(19) United States
(12) Patent Application Publication
(10) Pub. No.: US 2005/0070699 A1
(43) Pub. Date: Mar. 31, 2005

(54) Hbm variants that modulate bone mass and lipid levels

(76) Inventors: Kristina Allen, Hopkinton, MA (US); Anthony Anisowicz, West Newton, MA (US); James R. Graham, Arlington, MA (US); Arturo Morales, Arlington, MA (US); Paul J. Yaworsky, Rockland, MA (US); Wei Liu, Sudbury, MA (US)

Correspondence Address: BURNS DOANE SWECKER & MATHIS L L P, POST OFFICE BOX 1404, ALEXANDRIA, VA, 22313-1404, US

(21) Appl. No.: 10/477,173

(22) PCT Filed: May 13, 2002
(86) PCT No.: PCT/US02/14877

Related U.S. Application Data
(60) Provisional application No. 60/290,071, filed on May 11, 2001.
(60) Provisional application No. 60/291,311, filed on May 17, 2001.
(60) Provisional application No. 60/353,058, filed on Feb. 1, 2002.
(60) Provisional application No. 60/361,293, filed on Mar. 4, 2002.

(51) Int. Cl. C12Q 1/68; C07H 21/04; C12N 9/64

(52) U.S. Cl. 536/23.2; 435/6; 435/69.1; 435/226; 435/320.1; 435/325

(57) ABSTRACT

The present invention relates to methods and materials used to express an HBM-like polypeptide derived from HBM, LRP5 or LRP6 in animal cells and transgenic animals. The present invention also relates to transgenic animals expressing the HBM-like polypeptides. The invention provides nucleic acids, including coding sequences, oligonucleotide primers and probes, proteins, cloning vectors, expression vectors, transformed hosts, methods of developing pharmaceutical compositions, methods of identifying molecules involved in bone development, and methods of diagnosing and treating diseases involved in bone development and lipid modulation. In preferred embodiments, the present invention is directed to methods for treating, diagnosing and preventing osteoporosis.

### FIELD OF THE INVENTION

[0001] The present invention relates generally to the field of genetics, genomics and molecular biology. The invention relates to methods and materials used to isolate, detect and sequence a high bone mass gene and corresponding wild-type gene, and mutants thereof. The present invention also relates to the high bone mass (HBM) gene, the corresponding wild-type gene, and mutants thereof. The genes identified in the present invention are implicated in the ontology and physiology of bone development. The invention also provides nucleic acids, proteins, cloning vectors, expression vectors, transformed hosts, methods of developing pharmaceutical compositions, methods of identifying molecules involved in bone development, and methods of diagnosing and treating diseases involved in bone development and lipid levels. The invention further relates to transgenic animals for studying the HBM phenotype and related variant phenotypes, the mechanism of action of the HBM gene and its variants, and factors and treatments affecting normal and abnormal bone conditions. In preferred embodiments, the present invention is directed to methods for treating, diagnosing, preventing and screening for normal and abnormal conditions of bone, including metabolic bone diseases such as osteoporosis.

### BACKGROUND OF THE INVENTION

[0002] Two of the most common types of osteoporosis are postmenopausal and senile osteoporosis. Osteoporosis affects men as well as women, and, taken with other abnormalities of bone, presents an ever-increasing health risk for an aging population. The most common type of osteoporosis is that associated with menopause. Most women lose between 20-60% of the bone mass in the trabecular compartment of the bone within 3-6 years after the cessation of menses. This rapid loss is generally associated with an increase of bone resorption and formation. However, the resorptive cycle is more dominant and the result is a net loss of bone mass. Osteoporosis is a common and serious disease among postmenopausal women. There are an estimated 25 million women in the United States alone who are afflicted with this disease. The results of osteoporosis are both personally harmful, and also account for a large economic loss due to its chronicity and the need for extensive and long-term support (hospitalization and nursing home care) from the disease sequelae. This is especially true in more elderly patients. Additionally, while osteoporosis is generally not thought of as a life-threatening condition, a 20-30% mortality rate is related to hip fractures in elderly women. A large percentage of this mortality rate can be directly associated with postmenopausal osteoporosis. The costs alone associated with the treatment of osteoporotic fractures in the United States is $10 to $15 billion annually. Worldwide incidence of osteoporotic hip fractures is estimated to exceed 1.7 million cases.

[0003] The most vulnerable tissue in the bone to the effects of postmenopausal osteoporosis is the trabecular bone. This tissue is often referred to as spongy bone and is particularly concentrated near the ends of the bone near the joints and in the vertebrae of the spine. The trabecular tissue is characterized by small structures which inter-connect with each other as well as the more solid and dense cortical tissue which makes up the outer surface and central shaft of the bone. This crisscross network of trabeculae gives lateral support to the outer cortical structure and is critical to the biomechanical strength of the overall structure. In postmenopausal osteoporosis, it is primarily the net resorption and loss of the trabeculae which lead to the failure and fracture of the bone. In light of the loss of the trabeculae in postmenopausal women, it is not surprising that the most common fractures are those associated with bones which are highly dependent on trabecular support, e.g., the vertebrae, the neck of the femur, and the forearm. Indeed, hip fracture, Colle's fractures, and vertebral crush fractures are indicative of postmenopausal osteoporosis.

[0004] One of the earliest generally accepted methods for treatment of postmenopausal osteoporosis was estrogen replacement therapy. Although this therapy frequently is successful, patient compliance is low, primarily due to the undesirable side-effects of chronic estrogen treatment. Frequently cited side-effects of estrogen replacement therapy include reinitiation of menses, bloating, depression, and fear of breast or uterine cancer. In order to limit the known threat of uterine cancer in those women who have not undergone a hysterectomy, a protocol of estrogen and progestin cyclic therapy is often employed. This protocol is similar to that which is used in birth control regimens, and often is not tolerated by women because of the side-effects characteristic of progestin. More recently, certain antiestrogens, originally developed for the treatment of breast cancer, have been shown in experimental models of postmenopausal osteoporosis to be efficacious. Among these agents is raloxifene (See, U.S. Pat. No. 5,393,763, and Black et al, J. Clin. Invest., 93:63-69 (1994)). In addition, tamoxifene, a widely used clinical agent for the treatment of breast cancer, has been shown to increase bone mineral density in post menopausal women suffering from breast cancer (Love et al, N. Engl. J. Med., 326:852-856 (1992)).

[0005] Another therapy for the treatment of postmenopausal osteoporosis is the use of calcitonin. Calcitonin is a naturally occurring peptide which inhibits bone resorption and has been approved for this use in many countries (Overgaard et al, Br. Med. J., 305:556-561 (1992)). The use of calcitonin has been somewhat limited, however. Its effects are very modest in increasing bone mineral density and the treatment is very expensive. Another therapy for the treatment of postmenopausal osteoporosis is the use of bis-phosphonates. These compounds were originally developed for use in Paget's disease and malignant hypercalcemia. They have been shown to inhibit bone resorption. Alendronate, one compound of this class, has been approved for the treatment of postmenopausal osteoporosis. These agents may be helpful in the treatment of osteoporosis, but these agents also have potential liabilities which include osteomalacia, extremely long half-life in bone (greater than 2 years), and possible “frozen bone syndrome,” e.g., the cessation of normal bone remodeling.

[0006] Senile osteoporosis is similar to postmenopausal osteoporosis in that it is marked by the loss of bone mineral density and resulting increase in fracture rate, morbidity, and associated mortality. Generally, it occurs in later life, i.e., after 70 years of age. Historically, senile osteoporosis has been more common in females, but with the advent of a more elderly male population, this disease is becoming a major factor in the health of both sexes. It is not clear what, if any, role hormones such as testosterone or estrogen have in this disease, and its etiology remains obscure. Treatment of this disease has not been very satisfactory. Hormone therapy, estrogen in women and testosterone in men, has shown equivocal results; calcitonin and bis-phosphonates may be of some utility.

[0007] The peak mass of the skeleton at maturity is largely under genetic control. Twin studies have shown that the variance in bone mass between adult monozygotic twins is smaller than between dizygotic twins (Slemenda et al, J. Bone Miner. Res., 6:561-567 (1991); Young et al, J. Bone Miner. Res., 6:561-567 (1995); Pocock et al, J. Clin. Invest., 80:706-710 (1987); Kelly et al, J. Bone Miner. Res., 8:11-17 (1993)), and it has been estimated that up to 60% or more of the variance in skeletal mass is inherited (Krall et al, J. Bone Miner. Res., 10:S367 (1993)). Peak skeletal mass is the most powerful determinant of bone mass in elderly years (Hui et al, Ann. Int. Med., 111:355-361 (1989)), even though the rate of age-related bone loss in adult and later life is also a strong determinant (Hui et al, Osteoporosis Int., 1:30-34 (1995)). Since bone mass is the principal measurable determinant of fracture risk, the inherited peak skeletal mass achieved at maturity is an important determinant of an individual's risk of fracture later in life. Thus, study of the genetic basis of bone mass is of considerable interest in the etiology of fractures due to osteoporosis.

[0008] Recently, a strong interest in the genetic control of peak bone mass has developed in the field of osteoporosis. The interest has focused mainly on candidate genes with suitable polymorphisms to test for association with variation in bone mass within the normal range, or has focused on examination of genes and gene loci associated with low bone mass in the range found in patients with osteoporosis. The vitamin D receptor locus (VDR) (Morrison et al, Nature, 367:284-287 (1994)), PTH gene (Howard et al, J. Clin. Endocrinol. Metab., 80:2800-2805 (1995); Johnson et al, J. Bone Miner. Res., 8:11-17 (1995); Gong et al, J. Bone Miner. Res., 10:S462 (1995)) and the estrogen receptor gene (Hosoi et al, J. Bone Miner. Res., 10:S170 (1995); Morrison et al, Nature, 367:284-287 (1994)) have figured most prominently in this work. These studies are difficult because bone mass (the phenotype) is a continuous, quantitative, polygenic trait, and is confounded by environmental factors such as nutrition, co-morbid disease, age, physical activity, and other factors. Also, this type of study design requires large numbers of subjects. In particular, the results of VDR studies to date have been confusing and contradictory (Garnero et al, J. Bone Miner. Res., 10:1283-1288 (1995); Eisman et al, J. Bone. Miner. Res., 10:1289-1293 (1995); Peacock, J. Bone Miner. Res., 10:1294-1297 (1995)). Furthermore, the work thus far has not shed much light on the mechanism(s) whereby the genetic influences might exert their effect on bone mass.

[0009] While it is well known that peak bone mass is largely determined by genetic rather than environmental factors, studies to determine the gene loci (and ultimately the genes) linked to variation in bone mass are difficult and expensive. Study designs which utilize the power of linkage analysis, e.g., sib-pair or extended family, are generally more informative than simple association studies, although the latter do have value. However, genetic linkage studies involving bone mass are hampered by two major problems. The first problem is the phenotype, as discussed briefly above. Bone mass is a continuous, quantitative trait, and establishing a discrete phenotype is difficult. Each anatomical site for measurement may be influenced by several genes, many of which may be different from site to site. The second problem is the age component of the phenotype. By the time an individual can be identified as having low bone mass, there is a high probability that their parents or other members of prior generations will be deceased and therefore unavailable for study, and younger generations may not have even reached peak bone mass, making their phenotyping uncertain for genetic analysis.

[0010] Regardless, linkage analysis can be used to find the location of a gene causing a hereditary “disorder” and does not require any knowledge of the biochemical nature of the disorder, i.e., a mutated protein that is believed to cause the disorder does not need to be known. Traditional approaches depend on assumptions concerning the disease process that might implicate a known protein as a candidate to be evaluated. The genetic localization approach using linkage analysis can be used to first find the general chromosomal region in which the defective gene is located and then to gradually reduce the size of the region in order to determine the location of the specific mutated gene as precisely as possible. After the gene itself is discovered within the candidate region, the messenger RNA and the protein are identified and, along with the DNA, are checked for mutations.

[0011] The genetic localization approach has practical implications since the location of the disease can be used for prenatal diagnosis even before the altered gene that causes the disease is found. Linkage analysis can enable families, even many of those that do not have a sick child, to know whether they are carriers of a disease gene and to evaluate the condition of an unborn child through molecular diagnosis. The transmission of a disease within families, then, can be used to find the defective gene. As used herein, reference to “high bone mass” (HBM) is analogous to reference to a disease state, although from a practical standpoint high bone mass can actually help a subject avoid the disease known as osteoporosis.

[0012] Linkage analysis is possible because of the nature of inheritance of chromosomes from parents to offspring. During meiosis, the two parental homologues pair to guide their proper separation to daughter cells. While they are lined up and paired, the two homologues exchange pieces of the chromosomes, in an event called “crossing over” or “recombination.” The resulting chromosomes are chimeric, that is, they contain parts that originate from both parental homologues. The closer together two sequences are on the chromosome, the less likely that a recombination event will occur between them, and the more closely linked they are. In a linkage analysis experiment, two positions on the chromosomes are followed from one generation to the next to determine the frequency of recombination between them. In a study of an inherited disease, one of the chromosomal positions is marked by the disease gene or its normal counterpart, i.e., the inheritance of the chromosomal region can be determined by examining whether the individual displays symptoms of the disorder or not. The other position is marked by a DNA sequence that shows natural variation in the population such that the two homologues can be distinguished based on the copy of the “marker” sequence that they possess. In every family, the inheritance of the genetic marker sequence is compared to the inheritance of the disease state. If, within a family carrying an autosomal dominant disorder such as high bone mass, every affected individual carries the same form of the marker and all the unaffected individuals carry at least one different form of the marker, there is a great probability that the disease gene and the marker are located close to each other. In this way, chromosomes may be systematically checked with known markers and compared to the disease state. The data obtained from the different families is combined, and analyzed together by a computer using statistical methods. The result is information indicating the probability of linkage between the genetic marker and the disease allowing different distances between them. A positive result can mean that the disease is very close to the marker, while a negative result indicates that it is far away on that chromosome, or on an entirely different chromosome.

[0013] Linkage analysis is performed by typing all members of the affected family at a given marker locus and evaluating the co-inheritance of a particular disease state with the marker probe, thereby determining how often the two of them are co-inherited. The recombination frequency can be used as a measure of the genetic distance between two gene loci. A recombination frequency of 1% is equivalent to 1 map unit, or 1 centiorgan (cM), which is roughly equivalent to 1,000 kb of DNA. This relationship holds up to frequencies of about 20% or 20 cM.

[0014] The entire human genome is 3,300 cM long. In order to find an unknown disease gene within 5-10 cM of a marker locus, the whole human genome can be searched with roughly 330 informative marker loci spaced at approximately 10 cM intervals (Botstein et al., Am. J. Hum. Genet., 32:314-331 (1980)). The reliability of linkage results is established by using a number of statistical methods. The method most commonly used for the analysis of linkage in humans is the LOD score method (Morton, Prog. Clin. Biol. Res., 147:245-265 (1984), Morton et al., Am. J. Hum. Genet., 38:868-883 (1986)) which was incorporated into the computer program, LIPED, by Ott, Am. J. Hum. Genet., 28:528-529 (1976). LOD scores are the logarithm of the ratio of the likelihood that two loci are linked at a given distance to that they are not linked (>50 cM apart). The advantage of using logarithmic values is that they can be summed among families with the same disease. This becomes necessary given the relatively small size of human families.

[0015] By convention, a total LOD score greater than +3.0 (that is, odds of linkage at the specified recombination frequency being 1000 times greater than odds of no linkage) is considered to be significant evidence for linkage at that particular recombination frequency. A total LOD score of less than −2.0 (that is, odds of no linkage being 100 times greater than odds of linkage at the specified frequency) is considered to be strong evidence that the two loci under consideration are not linked at that particular recombination frequency. Until recently, most linkage analyses have been performed on the basis of two-point data, which is the relationship between the disorder under consideration and a particular genetic marker. However, as a result of the rapid advances in mapping the human genome over the last few years, and concomitant improvements in computer methodology, it has become feasible to carry out linkage analyses using multi-point data. Multi-point analysis provide a simultaneous analysis of linkage between the disease and several linked genetic markers, when the recombination distance among the markers is known.

[0016] Multi-point analysis is advantageous for two reasons. First, the informativeness of the pedigree is usually increased. Each pedigree has a certain amount of potential information, dependent on the number of parents heterozygous for the marker loci and the number of affected individuals in the family. However, few markers are sufficiently polymorphic as to be informative in all those individuals. If multiple markers are considered simultaneously, then the probability of an individual being heterozygous for at least one of the markers is greatly increased. Second, an indication of the position of the disease gene among the markers may be determined. This allows identification of flanking markers, and thus eventually allows isolation of a small region in which the disease gene resides. Lathrop et al., Proc. Natl. Acad. Sci. USA, 81:3443-3446 (1984) have written the most widely used computer package, LINKAGE, for multi-point analysis.

[0017] There is a need in the art for identifying the gene associated with a high bone mass phenotype. There is also a need for tools for the study of the high bone mass gene and phenotype. More generally there is need for the development of diagnostic tools and treatments. The present invention is directed to these, as well as other, important ends.

### SUMMARY OF THE INVENTION

[0018] It is an object of the invention to provide a nucleic acid comprising a mutation in LRP5 or LRP6 which results in a HBM phenotype when expressed in a cell, wherein said HBM phenotype results in bone mass modulation and/or lipid level modulation. Another embodiment contemplates that the mutation is located in propeller 1. In another embodiment, the nculeic acid encodes a mutation comprising at least one mutation of Tables 2 or 3 or which results in a mutation of one of the following G171V, A214V, A65V, M282V, G171K, G171F, G171I, G171Q, L200V, T201V, I202V, or S127V when expressed in a cell, and wherein expression of the nucleic acid in a subject results in bone mass modulation and/or lipid level modulation. In the instance of LRP6, the mutation is located in a position equivalent to LRP5 such that expression of the nucleic acid in a subject results in bone mass modulation and/or lipid level modulation. In another embodiment, the preferred mutation of LRP5 is G171V, A214V, A65V, M282V, G171K, G171F, G171I or G171Q or in an equivalent location if dealing with LRP6.

[0019] Another embodiment contemplated herein is a polypeptide encoded by any of the above nucleic acids, wherein said polypeptide when expressed in a cell modulates Wnt signaling, LRP5 activity and/or LRP6 activity. The polypeptide can additionally or alternatively modulate bone mass and/or lipid levels when expressed in a subject. These polypeptides or biologically active fragments thereof may preferably contain any of the following mutations of Table 2, G171V, A214V, A65V, M282V, G171K, G171F, G171I, G171Q, L200V, T201V, I202V, or S127V in LRP5 or in a equivalent location in LRP6. The most preferred mutations are G171V, A214V, A65V, M282V, G171K, G171F, G171I or G171Q in LRP5 or an equivalent location in LRP6.

[0020] Yet another embodiment contemplates antibodies an immunogenic fragments thereof which bind to these proteins. The contemplated antibodies include a monoclonal antibody, a chimeric antibody, a bispecific antibody, a humanized antibody, a primatized® antibody, a human antibody, or a labeled antibody. Preferably, some of the antibodies can discriminate between the wild type and variant forms of LRP5 and LRP6.

[0021] Another embodiment contemplates antibodies which bind to polypeptides comprising: ²⁰⁸KLYWADAKLSFIHRAN²³³, ²⁷⁷ALYSPMDIQVLSQER²⁹¹, ⁶¹GLEDAAAVDFQFSKGA⁷³, ²³⁴EGSLTHPFALTLSG²⁴⁷, ²⁴⁹TLYWTDWQTRSIHACN²⁶⁴, ¹⁴⁴VLFWQDLDQPRAI¹⁵⁶, ¹⁹⁴IYWPNGLTIDLEEQKLY²¹⁰, ³⁴LLLFANRRDVRLVD⁴⁷, ⁷⁵GAVYWTDVSEEAIKQ⁸⁹, ¹²¹KLYWTDSETNRIEVA¹³⁵ of LRP5 or an equivalent domain on LRP6 or variants thereof.

[0022] The above antibodies can also be used in a composition for modulating bone mass and/or lipid levels in a subject comprising a therapeutically effective amount of the antibody or immunogenic fragment and a pharmaceutically acceptable carrier.

[0023] The invention further contemplates a method of diagnosing a HBM like phenotype in a subject comprising: (A) obtaining a biological sample from said subject; (B) exposing the sample to one of the described antibodies or immunogenic fragments; and (C) detecting whether the antibody bound a protein from the biological sample from said subject to determine whether the subject has a HBM-like phenotype.

[0024] Another embodiment contemplates a transgenic animal having somatic and/or germ cells comprising a nucleic acid which comprises a promoter region that directs protein expression in animal and/or human cells operably linked to any of the herein described nucleic acids, and wherein said transgenic animal has at least three bone parameters modulated by the expression of said nucleic acid. The promoter region can be selected from the group consisting of CMV, RSV, SV40, and EF-1a, CMVβbActin, histone, type I collagen, TGFβ1, SX2, cfos/cjun, Cbfa1, Fra/Jun, Dlx5, osteocalcin, osteopontin, bone sialoprotein, and collagenase promoter regions.

[0025] A further embodiment of the invention contemplates an animal model for the study of bone density modulation and/or lipid level modulation comprising a first group of animals composed of any of the described transgenic animals and a second group of control animals.

[0026] Another embodiment provides for a method of identifying agents which modulate the activity of an HBM-like nucleic acid comprising: (A) transfecting a cell with a vector of claim 11; (B) exposing the transfected cell of step (A) to a compound; and (C) determining whether the compound modulates the activity of the HBM-like nucleic acid. Such agents can include a hormone, a growth factor, a peptide, RNA, siRNA, DNA, a mineral, a vitamin, a natural product, or a synthetic organic compound.

[0027] Another aspect of the invention provides for a method for identifying compounds which modulate the interaction of Dkk with the Wnt signaling pathway comprising: (A) transfecting cells with constructs containing any of the described nucleic acids; (B) assessing changes in expression of a reporter element linked to a Wnt-responsive promoter; and (C) identifying as a Dkk/Wnt interaction modulating compound any compound which alters reporter gene expression compared with cells transfected with a Dkk construct alone. The cells are preferably cancer cells, liver cells or bone cells. The reporter element used is TCF-luciferase, tk-Renilla, or a combination thereof.

[0028] Yet another embodiment includes a method of diagnosing a subject as expressing a nucleic acid comprising a nucleotide change of Tables 2 or 3 or any other mutations, the method comprising the steps of: (A) obtaining a biological sample from the subject; and (B) assaying for the presence of the nucleotide change which results in HBM phenotype.

[0029] The invention also provides agents identified by the above methods which regulate Wnt activity, Dkk activity, bone mass and/or lipid levels.

### BRIEF DESCRIPTION OF THE FIGURES

[0030] FIG. 1 shows the pedigree of the individuals used in the genetic linkage studies. Under each individual is an ID number, the z-score for spinal BMD, and the allele calls for the critical markers on chromosome 11. Solid symbols represent “affected” individuals. Symbols containing “N” are “unaffected” individuals. DNA from 37 individuals was genotyped. Question marks denote unknown genotypes or individuals who were not genotyped.

[0031] FIG. 2 depicts the BAC/STS content physical map of the HBM region in 11q13.3. STS markers derived from genes, ESTs, microsatellites, random sequences, and BAC end sequences are denoted above the long horizontal line. For markers that are present in GDB the same nomenclature has been used. Locus names (D11S####) are listed in parentheses after the primary name if available. STSs derived from BAC end sequences are listed with the BAC name first followed by L or R for the left and right end of the clone, respectively. The two large arrows indicate the genetic markers that define the HBM critical region. The horizontal lines below the STSs indicate BAC clones identified by PCR-based screening of a nine-fold coverage BAC library. Open circles indicate that the marker did not amplify the corresponding BAC library address during library screening. Clone names use the following convention: B for BAC, the plate, row and column address, followed by -H indicating the HBM project (i.e., B36F16-H).

[0032] FIGS. 3A-3F show the genomic structure of Zmax1 (LRP5) with flanking intron sequences. Translation is initiated by the underlined “ATG” in exon 1. The site of the polymorphism in the HBM gene is in exon 3 and is represented by the underlined “G,” whereby this nucleotide is a “T” in the HBM gene. The 3′ untranslated region of the mRNA is underlined within exon 23 (exon 1, SEQ ID NO:40; exon 2, SEQ ID NO:41; exon 3, SEQ ID NO:42; exon 4, SEQ ID NO:43; exon 5, SEQ ID NO:44; exon 6, SEQ ID NO:45; exon 7, SEQ ID NO:46; exon 8, SEQ ID NO:47; exon 9, SEQ ID NO:48; exon 10, SEQ ID NO:49; exon 11, SEQ ID NO:50; exon 12, SEQ ID NO:51; exon 13, SEQ ID NO:52; exon 14, SEQ ID NO:53; exon 15, SEQ ID NO:54; exon 16, SEQ ID NO:55; exon 17, SEQ ID NO:56; exon 18, SEQ ID NO:57; exon 19, SEQ ID NO:58; exon 20, SEQ ID NO:59; exon 21, SEQ ID NO:60; exon 22, SEQ ID NO:61; and exon 23; SEQ ID NO:62).

[0033] FIG. 4 shows the domain organization of Zmax1 (LRP5), including the YWTD spacers, the extracellular attachment site, the binding site for LDL and calcium, the cysteine-rich growth factor repeats, the transmembrane region, the ideal PEST region with the CK-II phosphorylation site and the internalization domain. FIG. 4 also shows the site of the glycine to valine change that occurs in the HBM protein. The signal peptide is located at amino acids 1-31, the extracellular domain is located at amino acids 32-1385, the transmembrane segment is located at amino acids 1386-1413, and the cytoplasmic domain is located at amino acids 1414-1615.

[0034] FIG. 5 is a schematic illustration of the BAC contigs B527D12 and B200E21 in relation to the HBM gene.

[0035] FIGS. 6A-6J are the nucleotide (SEQ ID NO:1) and amino acid (SEQ ID NO:3) sequences of the wild-type gene, Zmax1 (LRP5). The location for the base pair substitution at nucleotide 582, a guanine to thymine, (SEQ ID NO: 2 and 4) is underlined. This allelic variant is the HBM gene. The HBM gene encodes for a protein with an amino acid substitution of glycine to valine at position 171. The 5′ untranslated region (UTR) boundaries bases 1 to 70, and the 3′ UTR boundaries bases 4916-5120.

[0036] FIGS. 7A and 7B are northern blot analyses showing the expression of Zmax1 (LRP5) in various tissues.

[0037] FIG. 8 is a PCR product analysis.

[0038] FIG. 9 is allele specific oligonucleotide detection of the Zmax1 (LRP5) exon 3 mutation.

[0039] FIG. 10 is the cellular localization of mouse Zmax1 (LRP5) by in situ hybridization at 100× magnification using sense and antisense probes.

[0040] FIG. 11 is the cellular localization of mouse Zmax1 (LRP5) by in situ hybridization at 400× magnification using sense and antisense probes.

[0041] FIG. 12 is the cellular localization of mouse Zmax1 (LRP5) by in situ hybridization of osteoblasts in the endosteum at 400× magnification using sense and antisense probes.

[0042] FIG. 13 shows antisense inhibition of Zmax1 (LRP5) expression in MC-3T3 cells.

[0043] FIG. 14 shows a Zmax1 (LRP5) exon 3 allele specific oligonucleotide (ASO) assay which illustrates the rarity of the HBM allele (right panels; T-specific oligo; 58° C. Wash) as compared to the wild-type Zmax1 (LRP5) allele (left panels, G-specific oligo; 55° C. Wash). The positive spots appearing in the right panels were positive controls.

[0044] FIG. 15 depicts a model representing the potential role of Zmax1 (LRP5) in focal adhesion signaling.

[0045] FIG. 16 depicts a schematic of two Zmax1 (LRP5) gene targeting vectors for the knock-out of endogenous mouse Zmax or conditional knock-in of the HBM polymorphism. B, X, and R indicate BamHI, XbaI, and EcoRI sites in DNA BAC 4735P5 respectively. Exons 3, 4, and 5 are indicated by black rectangles. A G→T base change is engineered at base 24 of exon 3 to produce the HBM polymorphism. The location of a LoxP flanked cassette containing a neomycin resistance gene and a synthetic pause sequence and probes used for screening and characterizing of ES cell clones are also indicated.

[0046] FIG. 17 confirms expression by the transgenic (i.e., HBMMCBA and HBMMTIC) and wild-type (i.e., ZmaxWTCBA and ZmaxWTTIC) plasmid constructs. These constructs were transiently transfected into HOB-02-02 cells and the mRNA levels determined using TaqMan® quantitative PCR. HBMMCBA and ZmaxWTCBA are shown in the left column (i.e. CMVβActin) and HBMMTIC and ZmaxWTTIC are shown in the right column (i.e. Type I collagen) of the Table.

[0047] FIG. 18 depicts a comparison between the human and mouse TaqMan® Primer/Probe sets. HOB (HOB-03-C5) and mouse (MC-3T3-E1) osteoblastic cell mRNA was analyzed using the probes and primers.

[0048] FIG. 19 depicts the quantification of human Zmax1 (LRP5) mRNA expressed in a mixed human and mouse RNA background using the TaqMan® Primer/Probe sets. Results are presented in Human Zmax1 (LRP5) mRNA added (ng) versus Human Zmax1 (LRP5) mRNA measured (ng).

[0049] FIG. 20 depicts expression of HBM in transgenic mice based on mRNA expression analyzed by TaqMan®.

[0050] FIGS. 21A-F Panels A-C depict the analysis of various transgenic mouse lines which express the HBMMCBA construct in spine (FIG. 21A), femur (FIG. 21B) and total body (FIG. 21C). Panels D-F depict the analysis of various transgenic mouse lines which express the HBMMTIC construct in spine (FIG. 21D), femur (FIG. 21E) and total body (FIG. 21F).

[0051] FIG. 22 depicts changes in BMD in HBM transgenic mice (i.e., HBMMCBA and HBMMTIC constructs) at 5 weeks using in vivo pDXA* analysis. The BMD changes are presented as compared to wild-type animals which were also only 5 weeks old.

[0052] FIG. 23 depicts changes in BMD in HBM transgenic nice (i.e., HBMMCBA and HBMMTIC constructs) at 9 weeks using in vivo pDXA* analysis. The BMD changes are presented as compared to wild-type animals which were also only 9 weeks old.

[0053] FIGS. 24(A-D) presents the sequence of the insert of the gene, HBMGI_{—}2AS, subcloned into the vector (SEQ ID NO:759).

[0054] FIGS. 25(A-D) presents the sequence of the insert of the gene, ZMAXGI_{—}3AS, subcloned into the vector (SEQ ID NO:760).

[0055] FIGS. 26(A-C) presents an alignment of human (SEQ ID NO:761) and mouse (SEQ ID NO:762) Zmax1 (LRP5) amino acid sequences.

[0056] FIGS. 27(A-C) presents an alignment of human LRP5 (Zmax1) (SEQ ID NO:763) and LRP6 (SEQ ID NO:764) amino acid sequences.

[0057] FIG. 28 shows a schematic of the components of the Wnt signal transduction pathway. Schematic obtained from: http://www.stanford.edu/˜musse/pathways/cell2.html.

[0058] FIG. 29 shows that the mutation G171F in LRP5 produces a greater activation of the Wnt pathway than LRP5 which is consistent with HBM activity.

[0059] FIG. 30 shows that the mutation M282V in LRP5 produces an activation of the Wnt pathway which is consistent with HBM activity in U2OS cells.

[0060] FIG. 31 shows a table of proteins identified in a Y2H screen using a Dkk-1 bait sequence. These proteins are identified by both their nucleic acid and amino acid accession numbers.

[0061] FIG. 32 shows the differential binding of an antibody generated to a sequence (a.a. 165-177) containing the HBM mutation in LRP5 in LRP5 and HBM virus-infected cells.

[0062] FIG. 33 shows a diagram of the Xenopus Embryo Assay for Wnt activity.

[0063] FIG. 34 shows the effects of Zmax/LRP5 and HBM on Wnt signaling in the Xenopus embryo assay.

[0064] FIG. 35 shows the effects of Zmax/LRP5 and HBM on induction of secondary axis formation in the Xenopus embryo assay.

[0065] FIG. 36 shows the effects of human Dkk-1 on the repression of the canonical Wnt pathway.

[0066] FIG. 37 shows the effects of human Dkk-1 on Zmax/LRP5 and HBM-mediated Wnt signaling.

[0067] FIG. 38 shows a table of peptide aptamer insert sequences identified in a Y2H screen using a LRP5 ligand binding domain bait sequence.

[0068] FIG. 39 shows pcDNA3.1 construct names with nucleotide sequences for LRP5-binding peptide aptamers, Dkk-1 peptides and control constructs.

[0069] FIG. 40 shows the results of a minimum interaction domain mapping screen of Dkk-1 with LRP5. At the top, a map of Dkk-1 showing the location of the signal sequence, and cysteine rich domains 1 and 2. Below, the extent of domains examined using LRP5 LBD baits, LBD1 and LBD4. To the right, scoring of the binding results observed in the experiment.

[0070] FIG. 41 shows the effects of Dkk-1 and Dkk-2 on Wnt1 signaling with coreceptors LRP5, HBM, and LRP6 in HOB03CE6 cells.

[0071] FIG. 42 shows the effects of Dkk-1 and Dkk-2 on Wnt3a signaling with coreceptors LRP5, HBM, and LRP6in HOB03CE6 cells.

[0072] FIG. 43 demonstrates that the LRP5-LBD peptide aptamer 262 activates Wnt signaling in the presence of Wnt3a in U2OS cells.

[0073] FIG. 44 shows the amino acid sequences for the corresponding LRP5-binding peptides, Dkk-1 peptide aptamers and control constructs in FIG. 39.

[0074] FIG. 45 shows that Dkk-1 represses Wnt3a-mediated Wnt signaling in U2OS bone cells using the cell-based reporter gene assay for high throughput screening.

[0075] FIG. 46 demonstrates that Wnt1-HBM generated signaling is not efficiently inhibited by Dkk-1 in U2OS bone cells while LRP5 and LRP6-mediated signaling are using the cell-based reporter gene assay for high throughput screening.

[0076] FIG. 47 shows that the TCF signal in the cell-based reporter gene assay for high throughput screening can be modulated by Dkk-1 and Dkk-1-AP without Wnt DNA transfection.

[0077] FIG. 48 shows the morphological results in the Xenopus assay using aptamers 261 and 262 from the LRP5-LBD to activate Wnt signaling.

[0078] FIG. 49 demonstrates that LRP5-LBD aptamers 261 and 262 induce Wnt signaling over other LRP5 aptamers.

[0079] FIG. 50 depicts the LRP5 domain structure. The symbols are defined at the upper right. The structural domains are numbered successively from top to bottom corresponding to the N-terminal to C-terminal ends of the protein as Propeller 1, EGF-like Domain 1, Propeller 2, EGF-like Domain 2, and so forth. The structure was determined using the motifs and nomenclature described in Springer et al., 1998 J. Mol. Biol. 283: 837-62.

[0080] FIG. 51 CLUSTALW (1.8) multiple sequence alignment of the β-propeller segments of LRP5 from human (af077820h) and mouse (af064984m and af077847m), LRP6 from human (af074264h) and mouse (af074265m), and the sequences from proteins with modeled 6-bladed β-propellers: chicken LRP1(1lpx) and human nidogen (1ndx). For the LPRs, the final suffix letter designates which of the four propeller domains the sequence comes from (a→prop. #1, b→prop. #2, etc.). The final four lines give the secondary structure assignments predicted by DSC for all sequences given in this alignment (H=helix, E=strand and C=coil) and the weights assigned to each structural type at each position on a scale of 0 (least probable) to 9 (most probable). Sequences corresponding to Springer's models' strand positions are underlined and color-coded according to which of the six blades they belong to. In the propeller geometry, alternate loops fall on opposite faces of the disc-shaped domain. The loops on the “top” face (i.e., opposite the points of entry and exit of the chain from the structure) are colored red. The position of the G171V mutation is marked with “*”.

[0081] FIG. 52 displays the functional effect of mutations on side chain interactions in HBM protein as compared the wild-type Zmax1 (LRP5) protein. It also shows the side chain interactions of G171F, an HBM like variant.

[0082] FIG. 53 displays the structural change due to the OPPG mutation versus the wild-type, Zmax1 (LRP5). Panel A depicts the homology model of LRP5's second propeller domain; Panel B depicts the third propeller domain and Panel C depicts the second propeller domain with two mutations.

### DETAILED DESCRIPTION OF THE INVENTION

[0083] 1. Definitions

[0084] To aid in the understanding of the specification and claims, the following definitions are provided.

[0085] “Gene” refers to a DNA sequence that encodes through its template or messenger RNA a sequence of amino acids characteristic of a specific peptide. The term “gene” includes intervening, non-coding regions, as well as regulatory regions, and can include 5′ and 3′ ends.

[0086] By “nucleic acid” is meant to include single stranded and double stranded nucleic acids including, but not limited to DNAs, RNAs (e.g., mRNA, tRNAs, siRNAs), cDNAs, recombinant DNA (rDNA), rRNAs, antisense nucleic acids, oligonucleotides, and oligomers, and polynucleotides. The term may also include hybrids such as triple stranded regions of RNA and/or DNA or double stranded RNA:DNA hybrids. The term also is contemplated to include modified nucleic acids such as, but not limited to biotinylated nucleic acids, tritylated nucleic acids, fluorophor labeled nucleic acids, inosine, and the like.

[0087] “Gene sequence” refers to a nucleic acid molecule, including DNA which contains a non-transcribed or non-translated sequence, which comprises a gene. The term is also intended to include any combination of gene(s), gene fragment(s), non-transcribed sequence(s) or non-translated sequence(s) which are present on the same DNA molecule.

[0088] The nucleic acid sequences of the present invention may be derived from a variety of sources including DNA, cDNA, synthetic DNA, synthetic RNA or combinations thereof. Such sequences may comprise genomic DNA which may or may not include naturally occurring introns. Moreover, such genomic DNA may be obtained in association with promoter regions and/or poly (A) sequences. The sequences, genomic DNA or cDNA may be obtained in any of several ways. Genomic DNA can be extracted and purified from suitable cells by means well known in the art. Alternatively, mRNA can be isolated from a cell and used to produce cDNA by reverse transcription or other means.

[0089] “cDNA” refers to complementary or copy DNA produced from an RNA template by the action of RNA-dependent DNA polymerase (reverse transcriptase). Thus, a “cDNA clone” means a duplex DNA sequence for which one strand is complementary to an RNA molecule of interest, carried in a cloning vector or PCR amplified. cDNA can also be single stranded after first strand synthesis by reverse transcriptase. In this form, it is a useful PCR template and does not need to be carried in a cloning vector. This term includes genes from which the intervening sequences have been removed. Thus, the term “gene”, as sometimes used generically, can also include nucleic acid molecules comprising cDNA and cDNA clones.

[0090] “Recombinant DNA” means a molecule that has been engineered by splicing in vitro a cDNA or genomic DNA sequence or altering a sequence by methods such as PCR mutagenesis.

[0091] “Cloning” refers to the use of in vitro recombination techniques to insert a particular gene or other DNA sequence into a vector molecule. In order to successfully clone a desired gene, it is necessary to use methods for generating DNA fragments, for joining the fragments to vector molecules, for introducing the composite DNA molecule into a host cell in which it can replicate, and for selecting the clone having the target gene from amongst the recipient host cells.

[0092] “cDNA library” refers to a collection of recombinant DNA molecules containing cDNA inserts which together comprise the entire or a partial repertoire of genes expressed in a particular tissue or cell source. Such a cDNA library can be prepared by methods known to one skilled in the art and described by, for example, Cowell and Austin, “cDNA Library Protocols,” Methods in Molecular Biology (1997).

[0093] “Cloning vehicle” refers to a plasmid or phage DNA or other DNA sequence which is able to replicate in a host cell. This term can also include artificial chromosomes such as BACs and YACs. The cloning vehicle is characterized by one or more endonuclease recognition sites at which such DNA sequences may be cut in a determinable fashion without loss of an essential biological function of the DNA, which may contain a marker suitable for use in the identification of transformed cells.

[0094] “Expression” refers to the process comprising transcription of a gene sequence and subsequent processing steps, such as translation of a resultant mRNA to produce the final end product of a gene. The end product may be a protein (such as an enzyme or receptor) or a nucleic acid (such as a tRNA, antisense RNA, or other regulatory factor). The term “expression control sequence” refers to a sequence of nucleotides that control or regulate expression of structural genes when operably linked to those genes. These include, for example, the lac systems, the trp system, major operator and promoter regions of the phage lambda, the control region of fd coat protein and other sequences known to control the expression of genes in prokaryotic or eukaryotic cells. Expression control sequences will vary depending on whether the vector is designed to express the operably linked gene in a prokaryotic or eukaryotic host, and may contain transcriptional elements such as enhancer elements, termination sequences, tissue-specificity elements and/or translational initiation and termination sites.

[0095] “Expression vehicle” refers to a vehicle or vector similar to a cloning vehicle but which is capable of expressing a gene which has been cloned into it, after transformation into a host. The cloned gene is usually placed under the control of (i.e., operably linked to) an expression control sequence.

[0096] “Operator” refers to a DNA sequence capable of interacting with the specific repressor, thereby controlling the transcription of adjacent gene(s).

[0097] “Promoter” refers to a DNA sequence that can be recognized by an RNA polymerase. The presence of such a sequence permits the RNA polymerase to bind and initiate transcription of operably linked gene sequences.

[0098] “Promoter region” is intended to include the promoter as well as other gene sequences which may be necessary for the initiation of transcription. The presence of a promoter region is sufficient to cause the expression of an operably linked gene sequence. The term “promoter” is sometimes used in the art to generically indicate a promoter region. Many different promoters are known in the art which direct expression of a gene in a certain cell types. Tissue-specific promoters can comprise nucleic acid sequences which cause a greater (or decreased) level of expression in cells of a certain tissue type.

[0099] “Operably linked” means that the promoter controls the initiation of expression of the gene. A promoter is operably linked to a sequence of proximal DNA if upon introduction into a host cell the promoter determines the transcription of the proximal DNA sequence(s) into one or more species of RNA. A promoter is operably linked to a DNA sequence if the promoter is capable of initiating transcription of that DNA sequence.

[0100] “Prokaryote” refers to all organisms without a true nucleus, including bacteria.

[0101] “Eukaryote” refers to organisms and cells that have a true nucleus, including mammalian cells.

[0102] “Host” includes prokaryotes and eukaryotes, such as yeast and filamentous fungi, as well as plant and animal cells. The term includes an organism or cell that is the recipient of a replicable expression vehicle.

[0103] The term “animal” is used herein to include all vertebrate animals, except humans. It also includes an individual animal in all stages of development, including embryonic and fetal stages. Preferred animals include higher eukaryotes such as avians, rodents (e.g., nice, rabbits, rats, chinchillas, guinea pigs, hamsters and the like), and mammals. Preferred mammals include bovine, equine, feline, canine, ovine, caprine, porcine, buffalo, humans, and primates.

[0104] A “transgenic animal” is an animal containing one or more cells bearing genetic information received, directly or indirectly, by deliberate genetic manipulation or by inheritance from a manipulated progenitor at a subcellular level, such as by microinjection or infection with a recombinant viral vector (e.g., adenovirus, retrovirus, herpes virus, adeno-associated virus, lentivirus). This introduced DNA molecule may be integrated within a chromosome, or it may be extra-chromosomally replicating DNA.

[0105] “Embryonic stem cells” or “ES cells” as used herein are cells or cell lines usually derived from embryos which are pluripotent meaning that they are un-differentiated cells. These cells are also capable of incorporating exogenous DNA by homologous recombination and subsequently developing into any tissue in the body when incorporated into a host embryo. It is possible to isolate pluripotent cells from sources other than embryonic tissue by methods which are well understood in the art.

[0106] Embryonic stem cells in mice have enabled researchers to select for transgenic cells and perform gene targeting. This allows more genetic engineering than is possible with other transgenic techniques. For example, mouse ES cells are relatively easy to grow as colonies in vitro. The cells can be transfected by standard procedures and transgenic cells clonally selected by antibiotic resistance. See, for example, Doetschman et al., 1994, Gene transfer in embryonic stem cells. In Pinkert (Ed.) Transgenic Animal Technology: A Laboratory Handbook. Academic Press Inc., New York, pp.115-146. Furthermore, the efficiency of this process is such that sufficient transgenic colonies (hundreds to thousands) can be produced to allow a second selection for homologous recombinants. Mouse ES cells can then be combined with a normal host embryo and, because they retain their potency, can develop into all the tissues in the resulting chimeric animal, including the germ cells. The transgenic modification can then be transmitted to subsequent generations.

[0107] Methods for deriving embryonic stem (ES) cell lines in vitro from early preimplantation mouse embryos are well known. See for example, Evans et al., 1981 Nature 29: 154-6 and Martin, 1981, Proc. Nat. Acad. Sci. USA, 78: 7634-8. ES cells can be passaged in an undifferentiated state, provided that a feeder layer of fibroblast cells or a differentiation inhibiting source is present.

[0108] The term “somatic cell” indicates any animal or human cell which is not a sperm or egg cell or is capable of becoming a sperm or egg cell. The term “germ cell” or “germ-line cell” refers to any cell which is either a sperm or egg cell or is capable of developing into a sperm or egg cell and can therefore pass its genetic information to offspring. The term “germ cell-line transgenic animal” refers to a transgenic animal in which the genetic information was incorporated in a germ line cell, thereby conferring the ability to transfer the information to offspring. If such offspring in fact possess some or all of that information, then they, too, are transgenic animals.

[0109] The genetic alteration of genetic information may be foreign to the species of animal to which the recipient belongs, or foreign only to the particular individual recipient. In the last case, the altered or introduced gene may be expressed differently than the native gene.

[0110] “Fragment” of a gene refers to any portion of a gene sequence. A “biologically active fragment” refers to any portion of the gene that retains at least one biological activity of that gene. For example, the fragment can perhaps hybridize to its cognate sequence or is capable of being translated into a polypeptide fragment encoded by the gene from which it is derived.

[0111] “Variant” refers to a gene that is substantially similar in structure and biological activity or immunological characteristics to either the entire gene or to a fragment of the gene. Provided that the two genes possess a similar activity, they are considered variant as that term is used herein even if the sequence of encoded amino acid residues is not identical. Preferentially, as used herein (unless otherwise defined) the variant is one of LRP5, HBM or LRP6. The variant preferably is one that yields an HBM-like phenotype (i.e., enhances bones mass and/or modulates lipid levels). These variants include missense mutations, single nucleotide polymorphisms (SNPs), mutations which result in changes in the amino acid sequence of the protein encoded by the gene or nucleic acid, and combinations thereof, as well as corn in the exon domains of the HBM gene and mutations in LRP5 or LRP6 which result in an HBM like phenotype.

[0112] “Amplification of nucleic acids” refers to methods such as polymerase chain reaction (PCR), ligation amplification (or ligase chain reaction, LCR) and amplification methods based on the use of Q-beta replicase. These methods are well known in the art and described, for example, in U.S. Pat. Nos. 4,683,195 and 4,683,202. Reagents and hardware for conducting PCR are commercially available. Primers useful for amplifying sequences from the HBM region are preferably complementary to, and hybridize specifically to sequences in the HBM region or in regions that flank a target region therein. HBM sequences generated by amplification may be sequenced directly. Alternatively, the amplified sequence(s) may be cloned prior to sequence analysis.

[0113] “Antibodies” may refer to polyclonal and/or monoclonal antibodies and fragments thereof, and immunologic binding equivalents thereof, that can bind to the HBM proteins and fragments thereof or to nucleic acid sequences from the HBM region, particularly from the HBM locus or a portion thereof. Preferred antibodies also include those capable of binding to LRP5, LRP6 and HBM variants. The term antibody is used both to refer to a homogeneous molecular entity, or a mixture such as a serum product made up of a plurality of different molecular entities. Proteins may be prepared synthetically in a protein synthesizer and coupled to a carrier molecule and injected over several months into rabbits. Rabbit sera is tested for immunoreactivity to the HBM protein or fragment. Monoclonal antibodies may be made by injecting mice with the proteins, or fragments thereof. Monoclonal antibodies will be screened by ELISA and tested for specific immunoreactivity with HBM protein or fragments thereof Harlow et al., Antibodies: A Laboratory Manual, Cold Spring Harbor Laboratory, Cold Spring Harbor, N.Y. (1988) and Using Antibodies: A Laboratory Manual, Harlow, Ed and Lane, David (Cold Spring Harbor Press, 1999). These antibodies will be useful in assays as well as pharmaceuticals. By “antibody” is meant to include but not limited to polyclonal, monoclonal, chimeric, human, humanized, bispecific, multispecific, primatized™ antibodies.

[0114] “HBM protein” refers to a protein that is identical to a Zmax1 (LRP5) protein except that it contains an alteration of glycine 171 to a valine. An HBM protein is defined for any organism that encodes a Zmax1 (LRP5) true homolog. For example, a mouse HBM protein refers to the mouse Zmax1 (LRP5) protein having the glycine 170 to valine substitution.

[0115] By “HBM-like” is meant a variant of LRP5, LRP6 or HBM which when expressed in a cell is capable of modulating bone mass, lipid levels, Dkk activity, and/or Wnt activity.

[0116] In one embodiment of the present invention, “HBM gene” refers to the genomic DNA sequence found in individuals showing the HBM characteristic or phenotype, where the sequence encodes the protein indicated by SEQ ID NO: 4. The HBM gene and the Zmax1 (LRP5) gene are allelic. The protein encoded by the HBM gene has the property of causing elevated bone mass, while the protein encoded by the Zmax1 (LRP5) gene does not. The HBM gene and the Zmax1 (LRP5) gene differ in that the HBM gene has a thymine at position 582, while the Zmax1 gene has a guanine at position 582. The HBM gene comprises the nucleic acid sequence shown as SEQ ID NO: 2. The HBM gene may also be referred to as an “HBM polymorphism.” Other HBM genes may further have silent mutations, such as those discussed in Section 3 below.

[0117] In alternative embodiments of the present invention, “HBM gene” may also refer to any allelic variant of Zmax1 (LRP5) or LRP6 which results in the HBM phenotype. Such variants may include alteration from the wild-type protein coding sequence as described herein and/or alteration in expression control sequences of Zmax1 (LRP5) or contains an amino acid mutation in LRP5 or LRP6, such that the resulting protein produces a phenotype which enhances bone mass and/or modulates lipid levels. A preferred example of such a variant is an alteration of the endogenous Zmax1 (LRP5) promoter region resulting in increased expression of the Zmax1 (LRP5) protein.

[0118] “Normal,” “wild-type,” “unaffected”, “Zmax1”, “Zmax”, “LR3” and “LRP5” all refer to the genomic DNA sequence that encodes the protein indicated by SEQ ID NO: 3. LRP5 has also been referred to LRP7 in mouse. Zmax1, LRP5 and Zmax may be used interchangeably throughout the specification and are meant to be the same gene, perhaps only relating to the gene in a different organism. The Zmax1 gene has a guanine at position 582 in the human sequence. The Zmax1 gene of human comprises the nucleic acid sequence shown as SEQ ID NO: 1. “Normal,” “wild-type,” “unaffected”, “Zmax1” and “LRP5” also refer to allelic variants of the genomic sequence that encodes proteins that do not contribute to elevated bone mass. The Zmax1 (LRP5) gene is common in the human population, while the HBM gene is rare.

[0119] “5YWTD+EGF” refers to a repeat unit found in the Zmax1 (LRP5) protein, consisting of five YWTD repeats followed by an EGF repeat.

[0120] “Bone development” generally refers to any process involved in the change of bone over time, including, for example, normal development, changes that occur during disease states, and changes that occur during aging. This may refer to structural changes in and dynamic rate changes such as growth rates, resorption rates, bone repair rates, and etc. “Bone development disorder” particularly refers to any disorders in bone development including, for example, changes that occur during disease states and changes that occur during aging. Bone development may be progressive or cyclical in nature. Aspects of bone that may change during development include, for example, mineralization, formation of specific anatomical features, and relative or absolute numbers of various cell types.

[0121] “Bone modulation” or “modulation of bone formation” refers to the ability to affect any of the physiological processes involved in bone remodeling, as will be appreciated by one skilled in the art, including, for example, bone resorption and appositional bone growth, by, inter alia, osteoclastic and osteoblastic activity, and may comprise some or all of bone formation and development as used herein.

[0122] Bone is a dynamic tissue that is continually adapting and renewing itself through the removal of old or unnecessary bone by osteoblastic and the rebuilding of new bone by osteoblasts. The nature of the coupling between these processes is responsible both for the modeling of bone during growth as well as the maintenance of adult skeletal integrity through remodeling and repair to meet the everyday needs of mechanical usage. There are a number of diseases of bone that result from an uncoupling of the balance between bone resorption and formation. With aging there is a gradual “physiologic” imbalance in bone turnover, which is particularly exacerbated in women due to menopausal loss of estrogen support, that leads to a progressive loss of bone. The reduction in bone mass and deterioration in bone architecture results in an increase in bone fragility and susceptibility to spontaneous fractures. For every 10 percent of bone that is lost the risk of fracture doubles. Individuals with bone mineral density (BMD) in the spine or proximal femur 2.5 or more standard deviations below normal peak bone mass are classified as osteoporotic. However, osteopenic individuals with BMD between 1 and 2.5 standard deviations below the norm are clearly at risk of suffering bone loss related disorders.

[0123] Bone modulation may be assessed by measuring parameters such as bone mineral density (BMD) and bone mineral content (BMC) by pDXA X-ray methods, bone size, thickness or volume as measured by X-ray, bone formation rates as measured for example by calcien labeling, total, trabecular, and mid-shaft density as measured by pQCT and/or mCT methods, connectivity and other histological parameters as measured by mCT methods, mechanical bending and compressive strengths as preferably measured in femur and vertebrae respectively. Due to the nature of these measurements, each may be more or less appropriate for a given situation as the skilled practitioner will appreciate. Furthermore, parameters and methodologies such as a clinical history of freedom from fracture, bone shape, bone morphology, connectivity, normal histology, fracture repair rates, and other bone quality parameters are known and used in the art. Most preferably, bone quality may be assessed by the compressive strength of vertebra when such a measurement is appropriate. Bone modulation may also be assessed by rates of change in the various parameters. Most preferably, bone modulation is assessed at more than one age.

[0124] “Normal bone density” refers to a bone density within two standard deviations of a Z score of 0 in the context of the HBM linkage study. In a general context, the range of normal bone density parameters is determined by routine statistical methods. A normal parameter is within about 1 or 2 standard deviations of the age and sex normalized parameter, preferably about 2 standard deviations. A statistical measure of meaningfulness is the P value which can represent the likelihood that the associated measurement is significantly different from the mean. Significant P values are P<0.05, 0.01, 0.005, and 0.001, preferably at least P<0.01.

[0125] “HBM” refers to “high bone mass” although this term may also be expressed in terms of bone density, mineral content, and size.

[0126] The “HBM phenotype” and “HBM-like phenotype” may be characterized by an increase of about 2 or more standard deviations, preferably 2, 2.5, 3, or more standard deviations in 1, 2, 3, 4, 5, or more quantitative parameters of bone modulation, preferably bone-density and mineral content and bone strength parameters, above the age and sex norm for that parameter. The HBM phenotype and HBM-like phenotype are characterized by statistically significant increases in at least one parameter, preferably at least 2 parameters, and more preferably at least 3 or more parameters. The HBM phenotype and the HBM-like phenotype may also be characterized by an increase in one or more bone quality parameters and most preferably increasing parameters are not accompanied by a decrease in any bone quality parameters. Most preferably, an increase in bone modulation parameters and/or bone quality measurements is observed at more than one age. The HBM phenotype and HBM-like phenotype also includes changes of lipid levels, Wnt activity and/or Dkk activity.

[0127] A “Zmax1 system” or “LRP5 system” refers to a purified protein, cell extract, cell, animal, human or any other composition of matter in which Zmax1 (LRP5) is present in a normal or mutant form.

[0128] The terms “isolated” and “purified” refer to a substance altered by hand of man from the natural environment. An isolated peptide may be for example in a substantially pure form or otherwise displaced from its native environment such as by expression in an isolated cell line or transgenic animal. An isolated sequence may for example be a molecule in substantially pure form or displaced from its native environment such that at least one end of said isolated sequence is not contiguous with the sequence it would be contiguous with in nature.

[0129] A “surrogate marker” refers to a diagnostic indication, symptom, sign or other feature that can be observed in a cell, tissue, human or animal that is correlated with the HBM gene or elevated bone mass or both, but that is easier to measure than bone density. The general concept of a surrogate marker is well accepted in diagnostic medicine.

[0130] The present invention encompasses the Zmax1 (LRP5) gene and Zmax1 (LRP5) protein in the forms indicated by SEQ ID NOS: 1 and 3, respectively, and other closely related variants, as well as the adjacent chromosomal regions of Zmax1 (LRP5) necessary for its accurate expression. In a preferred embodiment, the present invention is directed to at least 15 contiguous nucleotides of the nucleic acid sequence of SEQ ED NO: 1.

[0131] The present invention further encompasses variants of the LRP6 gene and its corresponding protein which result in an enhanced bone mass and/or modulate lipids and/or modulate the Wnt signaling pathway.

[0132] “Biologically active” refers to those forms of proteins and polypeptides, including conservatively substituted variants, alleles of genes encoding a protein or polypeptide fragments of proteins which retain a biological and/or immunological activity of the wild-type protein or polypeptide. Preferably the activity is one which induces a change in LRP5, LRP6, or Dkk activity, such as inhibiting the interaction of LRP5 or LRP6 or variants thereof with Dkk, or Dkk with another ligand binding partner (e.g., Dkk-1 with a Dkk-1 interacting protein such as those shown in FIG. 31). By biologically active is also meant to include any form which modulates Wnt signaling.

[0133] By “modulate” and “regulate” is meant methods, conditions, or agents which increase or decrease the wild-type activity of an enzyme, inhibitor, signal transducer, receptor, transcription activator, co-factor, and the like. This change in activity can be an increase or decrease of mRNA translation, mRNA or DNA transcription, and/or mRNA or protein degradation, which may in turn correspond to an increase or decrease in biological activity.

[0134] By “modulated activity” and “regulated activity” is meant any activity, condition, disease or phenotype which is modulated by a biologically active form of a protein. Modulation may be effected by affecting the concentration or subcellular localization of biologically active protein, i.e., by regulating expression or degradation, or by direct agonistic or antagonistic effect as, for example, through inhibition, activation, binding, or release of substrate, modification either chemically or structurally, or by direct or indirect interaction which may involve additional factors.

[0135] By “effective amount” or “dose effective amount” or “therapeutically effective amount” is meant an amount of an agent which modulates a biological activity of the polypeptide of the invention.

[0136] By “immunologically active” is meant any immunoglobulin protein or fragment thereof which recognizes and binds to an antigen.

[0137] By “Dkk” is meant to refer to the nucleic acids and proteins of members of the Dkk (Dickkopf) family. This includes, but is not limited to, Dkk-1, Dkk-2, Dkk-3, Dkk-4, Soggy, and related Dkk proteins. Dkk-1 is a preferred embodiment of the present invention. However, the Dkk proteins have substantial homology and one skilled in the art will appreciate that all of the embodiments of the present invention utilizing Dkk-1 may also be utilized with the other Dkk proteins.

[0138] By “Dkk-1” is meant to refer to the Dkk-1 protein and nucleic acids which encode the Dkk-1 protein. Dkk-1 refers to Dickkopf-1, and in Xenopus it is related to at least Dkk-2, Dkk-3, and Dkk-4 (see Krupnik et al., 1999 Gene 238: 301-313). Dkk-1 was first identified in Xenopus (Glinka et al., 1998 Nature 391: 357-62). It was recognized as a factor capable of inducing ectopic head formation in the presence of inhibition of the BMP pathway. It was then also found to inhibit the axis-inducing activity of several Xenopus Wnt molecules by acting as an extracellular antagonist of Wnt signaling. Mammalian homologs have been found including Dkk-1, Dkk-2, Dkk-3, Dkk-4 and soggy (Fedi et al., 1999 J. Biol. Chem. 274: 19465-72; and Krupnick et al. 1999). Human Dkk-1 was also referred to as sk (Fedi et al. 1999). As used herein, Dkk-1 is meant to include proteins from any species having a Wnt pathway in which Dkk-1 interacts. Particularly preferred are mammalian species (e.g., murine, caprine, canine, bovine, feline, equine, primate, ovine, porcine and the like), with particularly preferred mammals being humans. Nucleic acid sequences encoding Dkk-1 include, but are not limited to human Dkk-1 (GenBank Accession Nos. AH009834, XM_{—}005730, AF261158, AF261157, AF177394, AF127563 and NM_{—}012242), Mus musculus dickkopf homolog 1 (GenBank Accession No. NM_{—}010051), and Danio rerio dickkopf-1 (GenBank Accession Nos. AF116852 and AB023488). The genomic sequences with exon annotation are GenBank Accession Nos. AF261157 and AF261158. Also contemplated are homologs of these sequences which have Dkk-1 activity in the Wnt pathway. Dkk-1 amino acid sequences include, but are not limited to human dickkopf homolog 1 (GenBank Accession Nos. AAG15544, BAA34651, NP_{—}036374, AAF02674, AAD21087, and XP_{—}005730), Danio rerio (zebrafish) dickkopf1 (GenBank Accession Nos. BAA82135 and AAD22461) and murine dickkopf-1 (GenBank Accession Nos. O54908 and NP_{—}034181). Variants and homologs of these sequences which possess Dkk-1 activity are also included when referring to Dkk-1.

[0139] By “LRP5 mediated”, “LRP6 mediated”, and ∂Dkk mediated” disorder, condition or disease is any abnormal state that involves LRP5, LRP6 and/or Dkk activity. The abnormal state can be induced by environmental exposure or drug administration. Alternatively, the disease or disorder can be due to a genetic defect. Dkk mediated diseases, disorders and conditions include but are not limited to bone mass disorders or conditions and lipid disorders and conditions. For example, bone mass disorders/conditions/diseases, which may be mediated by Dkk, LRP5 and/or LRP6 include but are not limited to age related loss of bone, bone fractures (e.g., hip fracture, Colle's fracture, vertebral crush fractures), chondrodystrophies, drug-induced disorders (e.g., osteoporosis due to administration of glucocorticoids or heparin and osteomalacia due to administration of aluminum hydroxide, anticonvulsants, or glutethimide), high bone turnover, hypercalcemia, hyperostosis, osteoarthritis, osteogenesis imperfecta, osteomalacia, osteomyelitis, osteoporosis, Paget's disease, and rickets.

[0140] Lipid disorders/diseases/conditions, which may be mediated by Dkk, LRP5, and/or LRP6 include but are not limited to familial lipoprotein lipase deficiency, familial apoprotein CII deficiency, familial type 3 hyperlipoproteinemia, familial hypercholesterolemia, familial hypertriglyceridemia, multiple lipoprotein-type hyperlipidemia, elevated lipid levels due to dialysis and/or diabetes, and elevated lipid levels of unknown etiologies

[0141] The term “recognizes and binds,” when used to define interactions of antisense nucleotides or siRNA's (small inhibitory RNA) with a target sequence, means that a particular antisense or small inhibitory RNA (siRNA) sequence is substantially complementary to the target sequence, and thus will specifically bind to a portion of an mRNA encoding polypeptide. As such, typically the sequences will be highly complementary to the mRNA target sequence, and will have no more than 1, 2, 3, 4, 5, 6, 7, 8, 9, or 10 base mismatches throughout the sequence. In many instances, it may be desirable for the sequences to be exact matches, i.e. be completely complementary to the sequence to which the oligonucleotide specifically binds, and therefore have zero mismatches along the complementary stretch. As such, highly complementary sequences will typically bind quite specifically to the target sequence region of the mRNA and will therefore be highly efficient in reducing, and/or even inhibiting the translation of the target mRNA sequence into polypeptide product.

[0142] Substantially complementary oligonucleotide sequences will be greater than about 80 percent complementary (or ‘% exact-match’) to the corresponding MnRNA target sequence to which the oligonucleotide specifically binds, and will, more preferably be greater than about 85 percent complementary to the corresponding mRNA target sequence to which the oligonucleotide specifically binds. In certain aspects, as described above, it will be desirable to have even more substantially complementary oligonucleotide sequences for use in the practice of the invention, and in such instances, the oligonucleotide sequences will be greater than about 90 percent complementary to the corresponding mRNA target sequence to which the oligonucleotide specifically binds, and may in certain embodiments be greater than about 95 percent complementary to the corresponding mRNA target sequence to which the oligonucleotide specifically binds, and even up to and including 96%, 97%, 98%, 99%, and even 100% exact match complementary to the target mRNA to which the designed oligonucleotide specifically binds.

[0143] Percent similarity or percent complementary of any of the disclosed sequences may be determined, for example, by comparing sequence information using the GAP computer program, version 6.0, available from the University of Wisconsin Genetics Computer Group (UWGCG). The GAP program utilizes the alignment method of Needleman and Wunsch (1970). Briefly, the GAP program defines similarity as the number of aligned symbols (i.e., nucleotides or amino acids) which are similar, divided by the total number of symbols in the shorter of the two sequences. The preferred default parameters for the GAP program include: (1) a unary comparison matrix (containing a value of 1 for identities and 0 for non-identities) for nucleotides, and the weighted comparison matrix of Gribskov and Burgess (1986), (2) a penalty of 3.0 for each gap and an additional 0.10 penalty for each symbol in each gap; and (3) no penalty for end gaps.

[0144] By “mimetic” is meant a compound or molecule that performs the same function or behaves similarly to the compound mimicked.

[0145] By “reporter element” is meant a polynucleotide that encodes a polypeptide capable of being detected in a screening assays. Examples of polypeptides encoded by reporter elements include, but are not limited to, lacZ, GFP, luciferase, and chloramphenicol acetyltransferase.

[0146] 2. Introduction

[0147] The present invention also encompasses the HBM gene and HBM protein ill the forms indicated by SEQ ID NO: 2 and 4, respectively, and other closely related variants, as well as the adjacent chromosomal regions of the HBM gene necessary for its accurate expression. In a preferred embodiment, the present invention is directed to at least 15 contiguous nucleotides of the nucleic acid sequence of SEQ ID NO: 2. More preferably, the present invention is directed to at least 15 contiguous nucleotides of the nucleic acid sequence of SEQ ID NO: 2, wherein one of the 15 contiguous nucleotides is the thymine at nucleotide 582.

[0148] The invention also relates to the nucleotide sequence of the Zmax1 (LRP5) gene region, as well as the nucleotide sequence of the HBM region. More particularly, a preferred embodiment are the BAC clones containing segments of the Zmax1 (LRP5) gene region B200E21-H and B527D12-H. A preferred embodiment is the nucleotide sequence of the BAC clones consisting of SEQ ID NOS: 5-12.

[0149] The invention also concerns the use of the nucleotide sequence to identify DNA probes for the Zmax1 (LRP5) gene and the HBM gene, PCR primers to amplify the Zmax1 (LRP5) gene and the HBM gene, nucleotide polymorphisms in the Zmax1 (LRP5) gene and the HBM gene, and regulatory elements of the Zmax1 (LRP5) gene and the HBM gene.

[0150] This invention describes the further localization of the chromosomal location of the Zmax1 (LRP5) gene and HBM gene on chromosome 11q13.3, between genetic markers D11S987 and SNP_CONTIG033-6, as well as the DNA sequences of the Zmax1 (LRP5) gene and the HBM gene. The chromosomal location was refined by the addition of more genetic markers to the mapping panel used to map the gene, and by the extension of the pedigree to include more individuals. The pedigree extension was critical because the new individuals that have been genotyped harbor critical recombination events that narrow the region. To identify genes in the region on 11q13.3, a set of BAC clones containing this chromosomal region was identified. The BAC clones served as a template for genomic DNA sequencing, and also as a reagent for identifying coding sequences by direct cDNA selection. Genomic sequencing and direct cDNA selection were used to characterize more than 1.5 million base pairs of DNA from 11q13.3. The Zmax1 (LRP5) gene was identified within this region and the HBM gene was then discovered after mutational analysis of affected and unaffected individuals.

[0151] When a gene has been genetically localized to a specific chromosomal region, the genes in this region can be characterized at the molecular level by a series of steps that include: cloning of the entire region of DNA in a set of overlapping clones (physical mapping), characterization of genes encoded by these clones by a combination of direct cDNA selection, exon trapping and DNA sequencing (gene identification), and identification of mutations in these genes by comparative DNA sequencing of affected and unaffected members of the HBM kindred (mutation analysis).

[0152] Physical mapping is accomplished by screening libraries of human DNA cloned in vectors that are propagated in E. coli or S. cereviseae using PCR assays designed to amplify unique molecular landmarks in the chromosomal region of interest. To generate a physical map of the HBM candidate region, a library of human DNA cloned in Bacterial Artificial Chromosomes (BACs) was screened with a set of Sequence Tagged Site (STS) markers that had been previously mapped to chromosome 11q12-q13 by the efforts of the Human Genome Project.

[0153] STSs are unique molecular landmarks in the human genome that can be assayed by PCR. Through the combined efforts of the Human Genome Project, the location of thousands of STSs on the twenty-two autosomes and two sex chromosomes has been determined. For a positional cloning effort, the physical map is tied to the genetic map because the markers used for genetic mapping can also be used as STSs for physical mapping. By screening a BAC library with a combination of STSs derived from genetic markers, genes, and random DNA fragments, a physical map comprised of overlapping clones representing all of the DNA in a chromosomal region of interest can be assembled.

[0154] BACs are cloning vectors for large (80 kilobase to 200 kilobase) segments of human or other DNA that are propagated in E. coli. To construct a physical map using BACs, a library of BAC clones is screened so that individual clones harboring the DNA sequence corresponding to a given STS or set of STSs are identified. Throughout most of the human genome, the STS markers are spaced approximately 20 to 50 kilobases apart, so that an individual BAC clone typically contains at least two STS markers. In addition, the BAC libraries that were screened contain enough cloned DNA to cover the human genome six times over. Therefore, an individual STS typically identifies more than one BAC clone. By screening a six-fold coverage BAC library with a series of STS markers spaced approximately 50 kilobases apart, a physical map consisting of a series of overlapping BAC clones, i.e. BAC contigs, can be assembled for any region of the human genome. This map is closely tied to the genetic map because many of the STS markers used to prepare the physical map are also genetic markers.

[0155] When constructing a physical map, it often happens that there are gaps in the STS map of the genome that result in the inability to identify BAC clones that are overlapping in a given location. Typically, the physical map is first constructed from a set of STSs that have been identified through the publicly available literature and World Wide Web resources. The initial map consists of several separate BAC contigs that are separated by gaps of unknown molecular distance. To identify BAC clones that fill these gaps, it is necessary to develop new STS markers from the ends of the clones on either side of the gap. This is done by sequencing the terminal 200 to 300 base pairs of the BACs flanking the gap, and developing a PCR assay to amplify a sequence of 100 or more base pairs. If the terminal sequences are demonstrated to be unique within the human genome, then the new STS can be used to screen the BAC library to identify additional BACs that contain the DNA from the gap in the physical map. To assemble a BAC contig that covers a region the size of the HBM candidate region (2,000,000 or more base pairs), it is often necessary to develop new STS markers from the ends of several clones.

[0156] After building a BAC contig, this set of overlapping clones serves as a template for identifying the genes encoded in the chromosomal region. Gene identification can be accomplished by many methods. Three methods are commonly used: (1) a set of BACs selected from the BAC contig to represent the entire chromosomal region can be sequenced, and computational methods can be used to identify all of the genes, (2) the BACs from the BAC contig can be used as a reagent to clone cDNAs corresponding to the genes encoded in the region by a method termed direct cDNA selection, or (3) the BACs from the BAC contig can be used to identify coding sequences by selecting for specific DNA sequence motifs in a procedure called exon trapping. The present invention includes genes identified by the first two methods.

[0157] To sequence the entire BAC contig representing the HBM candidate region, a set of BACs was chosen for subcloning into plasmid vectors and subsequent DNA sequencing of these subclones. Since the DNA cloned in the BACs represents genomic DNA, this sequencing is referred to as genomic sequencing to distinguish it from cDNA sequencing. To initiate the genomic sequencing for a chromosomal region of interest, several non-overlapping BAC clones are chosen. DNA for each BAC clone is prepared, and the clones are sheared into random small fragments which are subsequently cloned into standard plasmid vectors such as pUC18. The plasmid clones are then grown to propagate the smaller fragments, and these are the templates for sequencing. To ensure adequate coverage and sequence quality for the BAC DNA sequence, sufficient plasmid clones are sequenced to yield six-fold coverage of the BAC clone. For example, if the BAC is 100 kilobases long, then phagemids are sequenced to yield 600 kilobases of sequence. Since the BAC DNA was randomly sheared prior to cloning in the phagemid vector, the 600 kilobases of raw DNA sequence can be assembled by computational methods into overlapping DNA sequences termed sequence contigs. For the purposes of initial gene identification by computational methods, six-fold coverage of each BAC is sufficient to yield ten to twenty sequence contigs of 1000 base pairs to 20,000 base pairs.

[0158] The sequencing strategy employed in this invention was to initially sequence “seed” BACs from the BAC contig in the HBM candidate region. The sequence of the “seed” BACs was then used to identify minimally overlapping BACs from the contig, and these were subsequently sequenced. In this manner, the entire candidate region was sequenced, with several small sequence gaps left in each BAC. This sequence served as the template for computational gene identification. One method for computational gene identification is to compare the sequence of BAC contig to publicly available databases of cDNA and genomic sequences, e.g., unigene, dbEST, GenBank. These comparisons are typically done using the BLAST family of computer algorithm's and programs (Altschul et al., J. Mol. Biol., 215:403-410 (1990)). The BAC sequence can also be translated into protein sequence, and the protein sequence can be used to search publicly available protein databases, using a version of BLAST designed to analyze protein sequences (Altschul et al., 1997 Nucl. Acids Res. 25: 3389-3402). Another method is to use computer algorithms such as MZEF (Zhang, 1997 Proc. Natl. Acad. Sci. USA, 94: 565-568) and GRAIL (Uberbacher et al., 1996 Methods Enzymol. 266: 259-281), which predict the location of exons in the sequence based on the presence of specific DNA sequence motifs that are common to all exons, as well as the presence of codon usage typical of human protein encoding sequences.

[0159] In addition to identifying genes by computational methods, genes were also identified by direct cDNA selection (Del Mastro et al., 1995 Genome Res. 5(2): 185-194). In direct cDNA selection, cDNA pools from tissues of interest are prepared, and the BACs from the candidate region are used in a liquid hybridization assay to capture cDNA which base-pairs to coding regions in the BAC. In the methods described herein, the cDNA pools were created from several different tissues by random priming the first strand cDNA from poly-A RNA, synthesizing the second strand cDNA by standard methods, and adding linkers to the ends of the cDNA fragments. The linkers are used to amplify the cDNA pools. The BAC clones are used as a template for in vitro DNA synthesis to create a biotin labeled copy of the BAC DNA. The biotin labeled copy of the BAC DNA is then denatured and incubated with an excess of the PCR amplified, linkered cDNA pools which have also been denatured. The BAC DNA and cDNA are allowed to anneal in solution, and heteroduplexes between the BAC and the cDNA are isolated using streptavidin coated magnetic beads. The cDNA which is captured by the BAC is then amplified using primers complimentary to the linker sequences, and the hybridization/selection process is repeated for a second round. After two rounds of direct cDNA selection, the cDNA fragments are cloned, and a library of these direct selected fragments is created.

[0160] The cDNA clones isolated by direct selection are analyzed by two methods. Since a pool of BACs from the HBM candidate region is used to provide the genomic DNA sequence, the cDNAs must be mapped to individual BACs. This is accomplished by arraying the BACs in microtiter dishes, and replicating their DNA in high density grids. Individual cDNA clones are then hybridized to the grid to confirm that they have sequence identity to an individual BAC from the set used for direct selection, and to determine the specific identity of that BAC. cDNA clones that are confirmed to correspond to individual BACs are sequenced. To determine whether the cDNA clones isolated by direct selection share sequence identity or similarity to previously identified genes, the DNA and protein coding sequences are compared to publicly available databases using the BLAST family of programs.

[0161] The combination of genomic DNA sequence and cDNA sequence provided by BAC sequencing and by direct cDNA selection yields an initial list of putative genes in the region. The genes in the region were all candidates for the HBM locus. To further characterize each gene, Northern blots were performed to determine the size of the transcript corresponding to each gene, and to determine which putative exons were transcribed together to male an individual gene. For Northern blot analysis of each gene, probes were prepared from direct selected cDNA clones or by PCR amplifying specific fragments from genomic DNA or from the BAC encoding the putative gene of interest. The Northern blots gave information on the size of the transcript and the tissues in which it was expressed. For transcripts which were not highly expressed, it was sometimes necessary to perform a reverse transcription PCR assay using RNA from the tissues of interest as a template for the reaction.

[0162] Gene identification by computational methods and by direct cDNA selection provides unique information about the genes in a region of a chromosome. When genes are identified, then it is possible to examine different individuals for mutations in each gene.

[0163] The present invention also encompasses the HBM gene and HBM protein in the forms indicated by SEQ ID NO: 2 and 4, respectively, and other closely related variants, as well as the adjacent chromosomal regions of the HBM gene necessary for its accurate expression. In a preferred embodiment, the present invention is directed to an isolated nucleic acid sequence of SEQ ID NO: 2, as well as variants thereof. Variants include changes in SEQ ID NO:1 which result in a HBM like phenotype. Examples of such variants are discussed further in Section 3 below and in the examples. These variants preferably have at least about 90%, preferably at least about 95%, or more preferably at least about 98% or more similarity or identity to the nucleic acid sequence of SEQ ID NOS: 1 or 2 or biologically active fragments thereof. Therefore, sequences which are 96%, 97%, and 99% or more siuilar to SEQ ID NOS: 1 or 2 or biologically active fragments thereof are also contemplated herein.

[0164] Determination of the degree of variation between a high bone mass (HBM) variant can be performed using BLAST or FASTA or other suitable algorithm using standard default parameters. Preferably, identity will be determined for coding regions of SEQ ID NOS: 1-2, but can also include non-coding domains. Additionally, alignment programs can be used to identify conserved sequences or potential motifs across different animal species. Alignment programs can also be used to align the nucleic acid and/or protein sequences of related genes and the proteins that they encode. Preferred alignment programs include CLUSTALW, PILEUP and GAP, and would preferably be used with default parameters. For example, such programs can be used to align the sequences of Zmax1 (LRP5), HBM, and LDL receptor-related protein 6 (LRP6) and sequences related thereto.

[0165] By a polynucleotide having a nucleotide sequence at least, for example, 90% “similar” to a reference nucleotide sequence encoding a polypeptide, is intended that the nucleotide sequence of the polynucleotide is identical to the reference sequence except that the polynucleotide sequence may include up to ten point mutations per each 100 nucleotides of the reference nucleotide sequence. These mutations of the reference sequence may occur at any location in SEQ ID NO: 1 or 2 or in the LRP6 gene. The mutations may be silent.

[0166] Another embodiment contemplates that such polynucleotide variants of SEQ ID NO: 1 or 2 comprise nucleic acid sequences which are at least 15, 20, 25, 30, 35, 40, 45, 50, 60, 70, 80, 90, 100, 150, 200, 300, 400, or 500 contiguous nucleotides of SEQ ID NO: 1 or 2. More preferably, such polynucleotide variants have a contiguous nucleic acid sequence corresponding with the polymorphism at nucleotide 582 (G→T substitution) of SEQ ID NO: 2 or other variants of SEQ ID NO: 1 or 2, which comprise a mutation which modulates bone mass and/or lipid levels when the polypeptide encoded thereby is administered to a subject. All variants of SEQ ID NO: 1 or 2 contemplated possess the characteristic of encoding a protein or polypeptide which when administered to a subject induces bone modulation. Additional variants which may be responsible for modulating bone mass when administered to a subject may lie within the domain known to contain the HBM polymorphism and which encodes the beta propeller domain (YWTD motifs). Alternatively, other variants of Zmax1 (LRP5) which modulate high bone mass in a subject may be due to mutations in the nucleic acid sequences encoding any of the other conserved domains of Zmax1 (LRP5), such as those set forth in FIG. 4 (e.g., the RGD extracellular attachment site, the binding site for LDL and calcium, the cysteine rich growth factor repeats, the ideal PEST region, and the internalization domain). See Section 3 and the Examples below for additional mutations which may confer enhance bone mass and/or lipid modulation.

[0167] HBM polynucleotides and HBM like variants contemplated include those which hybridize under stringent conditions to SEQ ID NO: 2. Hybridization methods are known in the art and include, but are not limited to: (a) washing with 0.1×SSPE (0.62 M NaCl, 0.06 M NaH₂PO₄.H₂O, 0.075 M EDTA, pH 7.4) and 0.1% sodium dodecyl sulfate (SDS) at 50° C.; (b) washing with 50% formamide, 5×SSC (0.75 M NaCl, 0.075 M sodium citrate), 50 mM sodium phosphate (pH 6-8), 0. 1% sodium pyrophosphate, 5× Denliardt's solution, sonicated salmon sperm DNA (50 μg/ml), 0.1% SDS and 10% dextran sulfate at 42° C., followed by washing at 42° C. in 0.2×SSC and 0.1% SDS; and (c) washing with of 0.5 M NaPO₄, 7% SDS at 65° C. followed by washing at 60° C. in 0.5×SSC and 0.1% SDS. Additional conditions under which HBM variants can be isolated by hybridization to SEQ ID NO: 2 or nucleic acid fragments thereof can be performed by varying the hybridization temperature. High stringency hybridization conditions are those performed at about 20° C. below the melting temperature (Tₘ) of SEQ ID NO: 2 or fragments thereof. Preferred stringency is preformed at about 5-10° C. below the Tₘ of SEQ ID NO: 2 or fragments thereof. Additional hybridization conditions can be prepared as described in Chapter 11 of Sambrook et al., Molecular Cloning A Laboratory Manual (1989), or as would be known to the artisan of ordinary skill.

[0168] Alternatively, mammalian libraries (e.g., equine, primate, caprine, bovine, ovine, feline, porcine, and canine) can be probed using degenerate primers and polymerase chain reaction (PCR) techniques to identify variants of SEQ ID NO: 2 or fragments thereof. Preferably primers are utilized which hybridize under stringent conditions to the open reading frame of SEQ ID NO: 2, or to non-coding portions of the sequence. More preferably, such primers hybridize to conserved domains within SEQ ID NO: 2. For example, conserved domains include those coding for the YWTD beta-propeller domains or other domains, such as those listed in FIG. 4. Preferred primers are typically 15 nucleotides in length, but can vary to be at least, about 16, 17, 18, 19, 20, 21, 22, 23, 24, 25, 30, 35, 40 or 50 (and any range in between) nucleotides in length. Heterologous hybridization is to amplify the target gene or nucleic acid sequence using degenerate PCR primers. Probes for variants of SEQ ID NO: 2 and the polypeptide encoded thereby can be obtained by preparing mixed oligonucleotides of greater than 10, preferably of 15 or more, nucleotides in length representing all possible nucleotide sequences which could encode the corresponding amino acid sequences (e.g., SEQ ID NO: 4 fragments thereof). This method is clearly documented by Gould et al., 1989 Proc. Natl. Acad. Sci. USA 86(6): 1934-8.

[0169] Another embodiment includes nucleic acids which encode an HBM polypeptide or HBM like variant which is at least about 90% similar to SEQ ID NO: 4 and fragments thereof, and which when administered to a subject modulate bone mass in that subject. HBM variants may have a valine corresponding to position 171 of SEQ ID NO: 4 (Gly to Val substitution) or 170 of the mouse homolog, or an amino acid change elsewhere in propeller 1 or in the protein which results in enhanced bone mass and/or lipid modulation. Other preferred embodiments include high bone mass polypeptides which have at least about 10, 15, 20, 25, 30, 35, 40, 45, 50, 60, 70, 80, 90, 100, 150, 200, 250, 300, 500 or more contiguous amino acids of SEQ ID NO: 3 or 4, with a mutation in the sequence resulting in enhanced bone mass and/or modulated lipid levels. Such contemplated contiguous sequences preferably overlap with a polymorphism corresponding to high bone mass, such as valine-171 of SEQ ID NO: 4, other mutations in propeller 1 or is predicted from the model provided in the Examples. Also contemplated are the polynucleotides encoding polypeptides which are at least about 95%, 96%, 97%, 98% and 99% or more similar to SEQ ID NO: 3 or 4 and fragments thereof, wherein these polypeptide contain at least one mutation (e.g., valine-171 or like mutation).

[0170] In another embodiment, a synthetic nucleic acid encoding SEQ ID NO: 4 is contemplated wherein the nucleic acid sequence has been conservatively substituted based on the degeneracy of the code such that no amino acids are altered in SEQ ID NO: 4, but perhaps wherein the resulting synthetic polynucleotide encoding said SEQ ID NO: 4 is one that is at least, about 50% similar to SEQ ID NO: 2. Alternatively, SEQ ID NO: 4 may contain any of the silent mutations identified in Section 3 below.

[0171] By a polypeptide having an amino acid sequence of at least, for example, 95% “identity” to a reference amino acid sequence of SEQ ID NO: 3 or 4 or fragment thereof is intended that the amino acid sequence of the polypeptide is identical to the reference sequence except that the polypeptide sequence may include up to five amino acid alterations per each 100 amino acids of the reference amino acid sequence of SEQ ID NO: 3 or 4 and has an HBM like phenotype. In other words, to obtain a polypeptide having an amino acid sequence 95% identical to a reference amino acid sequence, up to 5% of the amino acid residues in the reference sequence may be deleted or substituted with another amino acid, or a number of amino acids up to 5% of the total amino acid residues in the reference sequence may be inserted into the reference sequence. These alterations of the reference sequence may occur at the amino or carboxy terminal positions of the reference amino acid sequence or anywhere between those terminal positions, interspersed either individually among residues in the reference sequence or in one or more contiguous groups within the reference sequence.

[0172] Additional HBM polypeptides and nucleic acids which encode said HBM polypeptides are contemplated wherein amino acid residues are conservatively substituted. For example, guidance concerning how to make phenotypically silent amino acid substitutions is provided in Bowie et al., “Deciphering the Message in Protein Sequences: Tolerance to Amino Acid Substitutions,” Science 247: 1306-10 (1990), wherein the authors indicate that there are two main approaches for studying the tolerance of an amino acid sequence to change. The first method relies on the process of evolution, in which mutations are either accepted or rejected by natural selection. The second approach uses genetic engineering to introduce amino acid changes at specific positions of a cloned gene and selections or screens to identify sequences that maintain functionality. These studies have revealed that proteins are surprisingly tolerant of amino acid substitutions. The authors further indicate which amino acid changes are likely to be permissive at a certain position of the protein. Numerous phenotypic substitutions are described in Bowie et al., supra, and the references cited therein, which are herein incorporated by reference in their entirety. Preferred substitutions would be in domains which are less conserved across species, and which do not correspond to a structurally or functionally important domain (e.g., a binding site, catalytic site, or beta propeller or other domain described in FIG. 4).

[0173] Recent studies have indicated that LRP5 participates in the Wnt signal transduction pathway. The Wnt pathway is critical in limb early embryological development. A recently published sketch of the components of Wnt signaling is shown in FIG. 28 (Nusse, 2001 http://www.stanford.edu/˜musse/pathways/cell2.html) (see also, Nusse, 2001 Nusse 411: 255-6; and Mao et al., 2001 Nature 411: 321-5).

[0174] Briefly summarized, Wnt proteins are secreted proteins which interact with the transmembrane protein Frizzled (Fz). LRP proteins, such as LRP5 and LRP6, are believed to modulate the Wnt signal in a complex with Fz (Tamai et al., 2000 Nature 407: 530-5). The Wnt pathway acts intracellularly through the Disheveled protein (Dsh) which in turn inhibits glycogen synthetase kinase-3 (GSK3) from phosphorylating β-catenin. Phosphorylated β-catenin is rapidly degraded following ubiquitination. However, the stabilized β-catenin accumulates and translocates to the nucleus where it acts as a cofactor of the T-cell factor (TCF) transcription activator complex.

[0175] The protein dickkopf-1 (Dkk-1) is reported to be an antagonist of Wnt pathway. Dkk-1 is required for head formation in early development (Glinka et al., 1998 Nature 391: 357-62). Dkk-1 and its function in the Wnt pathway are described in e.g., Krupnik, et al., 1999 Gene 238: 301-13; Fedi et al., 1999 J. Biol. Chem. 274: 19465-72; see also for Dkk-1 and the Wnt pathway, Wu et al., 2000 Curr. Biol. 10: 1611-4; Shinya et al., 2000 Mech. Dev. 98: 3-17; Mukhopadhyay et al., 2001 Dev. Cell. 1: 423-434; and in PCT Patent Application No. WO 00/52047, and in references cited in each. It has been known that Dkk-1 acts upstream of Dsh, however the nature of the mechanism of inhibition by Dkk-1 is just beginning to be elucidated. Dkk-1 is expressed in the mouse embryonic limb bud and its disruption results in abnormal limb morphogensis, among other developmental defects (Gotewold et al., 1999 Mech. Dev. 89:151-3; and Mukhopadhyay et al., 2001 Dev. Cell. 1: 423-34).

[0176] Related U.S. Ser. No. 60/291,311 (herein incorporated by reference in its entirety) disclosed a novel interaction between Dkk-1 (GenBank Accession No. XM 005730) and LRP5. The interaction between Dkk-1 and LRP5 was discovered by a yeast two hybrid (Y2H) screen for proteins which interact with the ligand binding domain of LRP5. The two-hybrid screen is a common procedure in the art, which is described, for example, by Gietz et al., 1997 Mol. Cell. Biochem. 172: 67-79; Young, 1998 Biol. Reprod. 58: 302-11; Brent et al., 1997 Ann. Rev. Genet. 31: 663-704; and Lu et al., eds., Yeast Hybrid Technologies, Eaton Publishing, Natick Mass., (2000). More recently, other studies confirm that Dkk-1 is a binding partner for LRP and modulates the Wnt pathway via direct binding with LRP (R. Nusse, 2001 Nature 411: 255-6; Bafico et al., 2001 Nat. Cell Biol. 3: 683-6; Semënov, 2001 Curr. Biol. 11: 951-61; Mao, 2001 Nature 411: 321-5 (2001); Zorn, 2001 Curr. Biol. 11: R592-5); and Li et al., 2002 J. Biol Chem. 277: 5977-81).

[0177] Mao and colleagues (2001) identified Dkk-1 as a ligand for LRP6. Mao et al. suggest that Dkk-1 and LRP6 interact antagonistically where Dkk proteins inhibit the Wnt coreceptor functions of LRP6. Using co-immunoprecipitation, the group verified that the Dkk-1/LRP6 interaction was direct. Dkk-2 was also found to directly bind LRP6. Contrary to data contained in provisional application 60/291,311, Mao et al. report that no interaction was detected between any Dkk protein and LRP5, as well as no interaction with LDLR, VLDLR, ApoER, or LRP). Additionally, Mao et al. demonstrated that LRP6 can titrate Dkk-1's effects of inhibiting Wnt signaling using the commercial TCF-luciferase reporter gene assay (TOPFLASH). A similar conclusion was drawn from analogous studies in Xenopus embryos. Deletion analyses of LRP6 functional domains revealed that EGF repeats (beta-propellers) 3 and 4 were necessary for Dkk-1 binding and that the ligand binding domains of LRP6 had no effect on Dkk-1 binding. The findings of Mao et al. contrast with data obtained by the present inventors indication that the ligand binding domains of LRP5 were necessary and sufficient for Dkk-1 binding in yeast. Using classical biochemical ligand-receptor studies, Mao et al. determined a Kd=0.34 nM for Dkk-1/LRP6 and a Kd=0.73 nM for Dkk-2/LRP6.

[0178] Semenov et al. (2001) verified the Mao group's results and confirmed by coimmunoprecipitation that Dkk-1 does not directly bind to Wnt or Frizzled but rather interacts with LRP6. Their Scatchard analyses found a Kd=0.5 nM for Dkk-1/LRP6. Semenov et al. also demonstrated that Dkk-1 could abolish an LRP5/Frizzled8 complex implying that Dkk-1 can also repress Wnt signaling via interactions with LRP5. A Dkk-1 mutant where cysteine 220 was changed to alanine abolished LRP6 binding and was unable to repress Wnt signaling. Studies in Xenopus embryos confirmed the results and revealed a functional consequence of Dkk-1/LRP6: repression of Wnt signaling. Their Xenopus work also suggested that LRP6/Dkk-1 may be specific for the canonical, β-catenin-mediated, Wnt pathways as opposed to the Wnt Planar Cell Polarity pathway.

[0179] Bafico et al. (2001) employed a ¹²⁵I-labeled Dkk-1 molecule to identify LRP6 as its sole membrane receptor with a Kd=0.39 nM. Again, the functional consequences of the Dkk-1/LRP6 interaction was a repression of the canonical Wnt signaling even when Dkk-1 was added at extremely low concentrations (30 pM).

[0180] Not wishing to be bound by theory, it is believed that the present invention provides an explanation for the mechanism of Dkk-1 inhibition of the Wnt pathway and provides a mechanism whereby the Wnt pathway may be modulated. The present application and related U.S. Ser. No. 60/291,311 (which is herein incorporated by reference in its entirety) describe Dkk-1/LRP5 interactions and demonstrate that the interaction between LRP5/LRP6/HBM, and Dkk can be used in a method as an intervention point in the Wnt pathway for an anabolic bone therapeutic or a modulator of lipid metabolism.

[0181] As detailed in the Examples, Dkk-1 is able to repress LRP5-mediated Wnt signaling but not HBM-mediated Wnt signaling. This observation is of particular interest because the HBM mutation in LRP5 is a gain of function or activation mutation. That is, Wnt signaling via the canonical pathway, is enhanced with HBM versus LRP5. Thus, other HBM-like mutations would also function similarly. The present data suggest the mechanism of this functional activation: the inability of Dkk-1 to repress HBM-mediated Wnt signaling. Further investigations of other Wnt or Dkk family members show differential activities in the canonical Wnt pathway that demonstrate the complexity and variability in Wnt signaling that can be achieved depending on the LRP/Dkk/Wnt/Frizzled repertoire that is expressed in a particular cell or tissue. This may attest to the apparent bone specificity of the HBM or HBM like phenotypes in humans and in the HBM transgenic animals.

[0182] Furthermore, the present data reveal the importance and functional consequence for the potential structural perturbation of the first beta-propeller domain of LRP5. Our data identified the ligand binding domain of LRP5 as the interacting region with Dkk-1 while the Mao et al. publication demonstrated the functional role of propellers 3 and 4 in their LRP6/Dkk-1 studies. In the present invention, we implicate the first beta propeller domain, via the HBM mutation at residue 171, as having a functional consequence in the Dkk-1-mediated Wnt pathway. The involvement of position 171 of propeller 1 may be direct or indirect with Dkk-1. Direct involvement could arise from perturbations of the 3-dimensional structure of the HBM extracellular domain that render Dkk-1 unable to bind. Alternatively, residue 171 of propeller 1 may directly interact with Dkk-1; however, by itself, it is insufficient to bind and requires other LRP5 domains. Potential indirect candidate molecules may be among the proteins identified the Dkk-1 yeast-two-hybrid experiments.

[0183] It may be that the disruption of Dkk activity is not necessarily mediated by enhancing or preventing the binding of Dkk to LRP5/LRP6/HBM. More than one mechanism may be involved. Indeed, the inventors have observed that Dkk-1 binds LRP5, LRP6, and HBM. It is able to effectively inhibit LRP6, and to a slightly lesser extent, LRP5 activity. Further, has been observed that different members of the Dkk family differentially affect LRP5/LRP6/HBM activity. For example, Dkk-1 inhibits LRP5/LRP6/HBM activity while another Dkk may enhance LRP5/LRP6/HBM activity. An endpoint to consider is the modulation of the LRP5/LRP6/HBM activity, not simply binding.

[0184] The present disclosure shows that targeting the modulation of the Dkk-1/LRP5 interaction is a therapeutic intervention point for an HBM or IBM-like mimetic agent. A therapeutic agent of the invention may be a small molecule, peptide or nucleic acid aptamer, antibody, or other peptide/protein, etc. Methods of reducing Dkk-1 expression may also be therapeutic using methodologies such as: RNA interference (i.e., siRNAs), small hairpin RNAs (shRNAs), antisense oligonucleotides, morpholino oligonucleotides, PNAs, antibodies to Dkk-1 or Dkk-1 interacting proteins, decoy or scavenger LRP5 or LRP6 receptors, and knockdown of Dkk-1 or Dkk-1 interactor transcription. For discussion of small hairpin RNAs, see Yu et al., 2002 Proc. Natl. Acad. Sci. USA 99: 6047-52; Tuschl, 2002 Nature Biotech. 20: 446-8; Lee et al., 2002 Nature Biotech. 19: 500-5; Paddison et al., 2002 Genes & Devel. 16: 948-58; and Brummelkamp et al., 2002 Science 296: 550-3.

[0185] In an embodiment of the present invention, the activity of Dkk-1 or the activity of a Dkk-1 interacting protein may be modulated for example by binding with a peptide aptamer of the present invention. In another embodiment, LRP5 activity may be modulated by a reagent provided by the present invention (e.g., a peptide aptamer). In another embodiment, the Dkk-1/LRP5 interaction may be modulated by a reagent of the present invention (e.g., a Dkk-1 interacting protein such as those identified in FIG. 31). In another embodiment, the Wnt signal transduction pathway may be modulated by use of one or more of the above methods. In a preferred embodiment of the present invention, the Dkk-1 mediated activity of the Wnt pathway may be specifically modulated by one or more of the above methods. In another preferred embodiment of the present invention, the Wnt signal transduction pathway may be stimulated by down-regulating Dkk-1 interacting protein activity; such down-regulation could, for example, yield-greater LRP5 activity. In a more preferred embodiment, by stimulating LRP5 activity, bone mass regulation may be stimulated to restore or maintain a more optimal level. In another preferred embodiment, by stimulating LRP5 activity, lipid metabolism may be stimulated to restore or maintain a more optimal level. Alternative embodiments provide methods for screening candidate drugs and therapies directed to correction of bone mass disorders or lipid metabolism disorders. And, preferred embodiments of the present invention provide drugs and therapies developed by the use of the reagents and/or methods of the present invention. One skilled in the art will understand that the present invention provides important research tools to develop an effective model of osteoporosis, to increase understanding of bone mass and lipid modulation, and to modulate bone mass and lipid metabolism. For a more detailed description of Dkk-1 and Dkk-1 interacting protein modulation, please refer to U.S. Ser. No. 60/361,293, which is herein incorporated by reference in its entirety.

[0186] 3. Alternative Variants of LRP5//LRP6 Having HBM Activity

[0187] A structural model of the LRP5/Zmax1 first beta-propeller module was generated based on a model prediction in Springer et al., 1998 J. Mol. Biol. 283: 837-862. Based on the model, certain amino acid residues were identified as important variants of LRP5/HBM/Zmax1. The model and modifications thereof are discussed in more detail in the Examples. The following three categories provide examples of such variants:

[0188] The shape of the beta-propeller resembles a disk with inward-sloping sides and a hole down the middle. Residue 171 is in a loop on the outer or top surface of the domain in blade 4 of propeller module 1. Thus, variants comprising changed residues in structurally equivalent positions in other blades; as well as residues that are slightly more interior to the binding pocket, but still accessible to the surface, are important embodiments of the present invention for the study of bone mass modulation by LRP5/HBM, for the development of pharmaceuticals and treatments of bone mass disorders, and for other objectives of the present invention. The following Table contains examples of such variants:

TABLE 1

| Variant | Effect of Mutation |
|---|---|
| A214V | a position equivalent to 171 in blade 5 of propeller 1; alanine is |
| | not conserved in other propellers |
| E128V | a position equivalent to 171 in blade 3 of propeller 1; glutamate |
| | is not conserved in other propellers |
| A65V | a position equivalent to 171 in blade 2 of propeller 1; alanine is |
| | conserved in propellers 1-3 but not 4 |
| G199V | an accessible interior position in blade 5 of propeller 1; glycine |
| | is conserved in propellers 1-3 but not 4 |
| M282V | accessible interior position in blade 1 of propeller 1; methionine |
| | is conserved in propellers 1-3 but not 4 |

These mutations were further analyzed based on a more sophisticated model, as discussed and described in Example 11 below.

[0190] LRP5/Zmax1 has four beta-propeller structures; the first three beta-propeller modules conserve a glycine in the position corresponding to residue 171 in human LRP5/Zmax1. Therefore, variants bearing a valine in the equivalent positions in the other propellers are important embodiments of the present invention. The following variants are useful for the study of bone mass modulation by LRP5/HBM, for the development of pharmaceuticals and treatments of bone mass disorders, and for other objectives of the present invention: G479V, G78 IV, and Q1087V of SEQ ID NO: 3, which demonstrate that propeller 1 is an important determinant of an HBM or HBM-like effect.

[0191] The G171V HBM polymorphism (SEQ ID NO: 4) results in “occupied space” of the beta-propeller 1, with the side-chain from the valine residue sticking out into an open binding pocket and potentially altering a ligand/protein interaction. The glycine residue is conserved in LRP5/Zmax1 propellers 1, 2 and 3 but is a glutamine in propeller 4. Therefore, the following variants of LRP5/HBM are important embodiments of the present invention for the study of bone mass modulation by LRP5/HBM, for the development of pharmaceuticals and treatments of bone mass disorders, and for other objectives of the present invention:
[0192] G171K: introduces a charged side-chain
[0193] G171F: introduces a ringed side-chain
[0194] G171I: introduces a branched side-chain
[0195] G171Q: introduces the propeller 4 residue
   These substitutions along with substitutions in other regions of propeller 1 of SEQ ID NO: 3 (i.e., A214V and M282V) have been shown to produce an HBM-like effect by TCF assay (FIGS. 29 and 30). Thus these substitutions in other propeller 1 domains would similarly have an expectation of producing an HBM-like phenotype readily assayable by TCF assay.

[0197] Furthermore, LRP6 is the closest homolog of LRP5/Zmax1. LRP6 has a beta-propeller structure predicted to be similar, if not identical to Zmax1. The position corresponding to glycine 171 of human LRP5/Zmax1 is glycine 158 of human LRP6. Thus, corresponding variants of LRP6 are an important embodiment of the present invention for the study of the specificity of LRP5/Zmax1 versus its related family member, for the development of pharmaceuticals and treatments of bone mass disorders, and for other objectives of the present invention. Specifically, for example, a glycine to valine substitution at the structurally equivalent position, residue 158, of human LRP6 and similar variants of other species' LRP6 homologs represent important research tools.

[0198] Site-directed mutants of LRP5 were generated in the full-length human LRP5 cDNA using the QuikChange XL-Site-Directed Mutagenesis Kit (catalog #200516, Stratagene, La Jolla, Calif.) following the manufacturer's protocol. The mutant sequences were introduced using complementary synthetic oligonucleotides:

| | |
|---|---|
| Mutation | Complementary oligos |

| | |
|---|---|
| A65V: | 5′-TGGTCAGCGGCCTGGAGGATGTGGCCGCAGTGGAC |
| | TTCC-3′ |
| | 5′-GGAAGTCCACTGCGGCCACATCCTCCAGGCCGCTG |
| | ACCA-3′ |
| E128V | 5′-AAGCTGTACTGGACGGACTCAGTGACCAACCGCAT |
| | CGAGG-3′ |
| | 5′-CCTCGATGCGGTTGGTCACTGAGTCCGTCCAGTAC |
| | AGCTT-3′ |
| G171K | 5′-ATGTACTGGACAGACTGGAAGGAGACGCCCCGGAT |
| | TGAGCG-3′ |
| | 5′-CGCTCAATCCGGGGCGTCTCCTTCCAGTCTGTCCA |
| | GTACAT-3′ |
| G171F | 5′-ATGTACTGGACAGACTGGTTTGAGACGCCCCGGAT |
| | TGAGCG-3′ |
| | 5′-CGCTCAATCCGGGGCGTCTCAAACCAGTCTGTCCA |
| | GTACAT-3′ |
| G171I | 5′-ATGTACTGGACAGACTGGATTGAGACGCCCCGGAT |
| | TGAGCG-3′ |
| | 5′-CGCTCAATCCGGGGCGTCTCAATCCAGTCTGTCCA |
| | GTACAT-3′ |
| G171Q | 5′-ATGTACTGGACAGACTGGCAGGAGACGCCCCGGAT |
| | TGAGCG-3′ |
| | 5′-CGCTCAATCCGGGGCGTCTCCTGCCAGTCTGTCCA |
| | GTACAT-3′ |
| G199V | 5′-CGGACATTTACTGGCCCAATGTACTGACCATCGAC |
| | CTGGAGG-3′ |
| | 5′-CCTCCAGGTCGATGGTCAGTACATTGGGCCAGTAA |
| | ATGTCCG-3′ |
| A214V | 5′-AGCTCTACTGGGCTGACGTCAAGCTCAGCTTCATC |
| | CACCG-3′ |
| | 5′-CGGTGGATGAAGCTGAGCTTGACGTCAGCCCAGTA |
| | GAGCT-3′ |
| M282V | 5′-GAGTGCCCTCTACTCACCCGTGGACATCCAGGTGC |
| | TGAGCC-3′ |
| | 5′-GGCTCAGCACCTGGATGTCCACGGGTGAGTAGAGG |
| | GCAGTC-3′ |
| G479V | 5′-CATGTACTGGACAGACTGGGTAGAGAACCCTAAAA |
| | TCGAGTGTGC-3′ |
| | 5′-GCACACTCGATTTTAGGGTTCTCTACCCAGTCTGT |
| | CCAGTACATG-3′ |
| G781V | 5′-CATCTACTGGACCGAGTGGGTCGGCAAGCCGAGGA |
| | TCGTGCG-3′ |
| | 5′-CGCACGATCCTCGGCTTGCCGACCCACTCGGTCCA |
| | GTAGATG-3′ |
| Q1087V | 5′-GTACTTCACCAACATGGTGGACCGGGCAGCCAAGA |
| | TCGAACG-3′ |
| | 5′-CGTTCGATCTTGGCTGCCCGGTCCACCATGTTGGT |
| | GAAGTAC-3′ |
| G158V of | 5′-GTACTGGACAGACTGGGTAGAAGTGCCAAAGATAG |
| | AACGTGC-3′ |
| LRP6 | 5′-GCACGTTCTATCTTTGGCACTTCTACCCAGTCTGT |
| | CCAGTAC-3′ |

[0199] All constructs were sequence verified to ensure that only the engineered modification was present in the gene. Once verified, each variant was functionally evaluated in the TCF-luciferase assay in U2OS cells (essentially as described in Example 6. Other functional evaluations could also be performed, such as the Xenopus embryo assay (essentially as described in Example 5), or other assays to evaluate Wnt signaling, Dkk modulation, or anabolic bone effect. Binding of these mutants to Dkk, LRP-interacting proteins, Dkk-interacting proteins, or peptide aptamers to any of the preceding could also be investigated in a variety of ways such as in a two-hybrid system (such as in yeast as described in this application), or other methods.

[0200] FIG. 29 shows the effects of the G171F mutation in propeller 1 of LRP5. This mutation is at the same position as HBM's G171V substitution. Expression of G171F results in an HBM effect. That is, in the presence of Wnt, G171F is able to activate the TCF-luciferase reporter construct. In fact, it may activate the reporter to a greater extent than either LRP5 or HBM. Furthermore, in the presence of Dkk1 and Wnt1, G171F is less susceptible than LRP5 to modulation by Dkk. These data exemplify that the G171F variant modulates Wnt signaling in a manner similar to HBM. In addition, this data confirms that HBM's valine residue at 171 is not the only modification at 171 that can result in an HBM effect. Together these data support an important role for LRP5 propeller 1 in modulating Wnt pathway activity; in responding to Dkk modulation; and, in the ability to generate an HBM effect.

[0201] FIG. 30 shows the effects of the M282V mutation in propeller 1 of LRP5. M282 expression results in an HBM-effect. That is, in the presence of Wnt, M282 is able to activate the TCF-luciferase reporter construct. Furthermore, in the presence of Dkk1 and Wnt1, M282V is less susceptible than LRP5 to modulation by Dkk. These data show that the M282V variant modulates Wnt signaling in a maimer similar to HBM. In addition, this data confirms that modifications of other residues in propeller 1 of LRP5 can result in an HBM effect.

[0202] These data support an “occupied space” model of the HBM mutation in propeller 1 and show that multiple mutations of propeller 1 are capable of generating an HBM effect; the original G171V HBM mutation is not unique in this ability. Moreover, various perturbations in propeller 1 can modulate Dkk activity.

[0203] These data illustrate the molecular mechanism of Dkk modulation of LRP signaling. Using the methods disclosed herein and in U.S. Application 60/290,071, generation of a comprehensive mutant panel will reveal residues in LRP that function in Dkk modulation of Wnt signaling. Such variants of LRP5 and LRP6 that modulate Dkk activity and the residues which distinguish them from LRP5 and LRP6 are points for therapeutic intervention by small molecule compound, antibody, peptide aptamer, or other agents. Furthermore, models of each HBM-effect mutation/polymorphism may be used in rational drug design of an HBM mimetic agent.

[0204] These and the examples provided infra are only a few illustrative examples presented to better describe the present invention. Variants of LRP5 which have demonstrated HBM activity in assays include A65V, G171I, G171V (HBM), G171F, M282V, G171K, G171Q and A214V. Clearly, other variants may be contemplated within the scope of the present invention. Furthermore, wherever HBM is recited in the methods of the invention, it should be understood that any such alternative variant of LRP5 or LRP6 which demonstrates HBM like biological activity is also encompassed by those claims.

[0205] Additional mutations may also result in conformational changes such as those described above and in the Examples below. These mutations may also result in a HBM-like phenotype when expressed. The following mutations have been identified in Table 2 based on familial genetics in the exons of Zmax1 (LRP5).

TABLE 2

Mutations in the Exons of LRP5

| | Location | | | | |
|---|---|---|---|---|---|
| | (ATG as | | | Met | AA |
| Exon | nt 1) | Reference | Change | as AA1 | Change |
| 2 | 249 | CGAGGAGGCCATC | C/T | S83 | None |
| 2 | 266 | AGACCTACCT | A/G | Q89 | G→R |
| 3 | 512 | GTGAGACGCC | G/T | G171 | G→V |
| 6 | 1199 | CGTACCTGGACGGG | C/T | A400 | A→V |
| 8 | 1647 | CGGGTTCACGCTGC | C/T | F549 | None |
| 9 | 1932 | GGCCTTCTTGGTCT | G/A | E644 | None |
| 9 | 1999 | GTGGCCATCCCGCT | G/A | V667 | V→M |
| 10 | 2220 | CAGAATCGAAGTG | C/T | N740 | None |
| 14 | 3107 | GGACACTGTT | G/A | R1036 | R→Q |
| 15 | 3297 | CGGCACCGAGCG | C/T | D1099 | None |
| 15 | 3357 | AGACAACACACTG | A/G | V1119 | None |
| 16 | 3564 | GACTCGCATC | G/A | R1188 | None |
| 18 | 3989 | CGGACTGTGA | C/T | A1330 | A→V |
| 20 | 4137 | CAGCCCGGCCCAC | C/T | D1379 | None |
| 20 | 4248 | GGGGGCCAACGG | G/A | A1416 | None |
| 20 | 4565 | CGGCCACTGC | C/T | P1522 | P→L |
| 23 | 4635 | CGACGTGTGTGACA | C/T | T1545 | None |

By, for example “C/T” is meant there is a C to T mutation.

[0207] Additional mutations have also been identified in the introns, which may result in splice variants are provided in Table 3 below.

TABLE 3

Mutations in the Introns of LRP5

| | Nucleotide | | |
|---|---|---|---|
| | Position with | Sequence with SNP | Nucleo- |
| Exon | respect to Exon | Location Underlined | tide |
| 2 | +53 | CTCTCTCTCGAATT | C/T |
| 5 | −4 | TCAGTCCACACTCG | T/C |
| 5 | +8 | GGGCGGGGGCTGGG | G/A |
| 7 | −50 | GCAGAGACCAGAC | G/A |
| 8 | −118 | TGCTCTTGGGCATT | T/G |
| 9 | −131 | TGGGGGTGAGTCCT | T/C |
| 10 | +6 | TGTTTGCCTGTCCC | T/C |
| 11 | −173 | ATGTGTGTGGCAG | A/G |
| 11 | −152 | GGTCTCGCCCTTC | G/A |
| 11 | −49 | CGGTGAGAGCAGAC | C/T |
| 11 | +37 | CGGGGCAGCCGGG | C/T |
| 11 | +78 | GTACCCTGTGGCCT | G/A |
| 12 | +80 | CTCATCTGGGGTTC | C/G |
| 12 | +141 | ATGATGCTACCTGG | A/G |
| 15 | −166 | CGGGAATTTGGAGA | C/T |
| 15 | −149 | TTGTTCAACTAGTA | T/C |
| 15 | −52 | TCCGAGGAGACGC | T/G |
| 17 | −213 | TTGTTTCCGGCATC | T/C |
| 17 | −82 | CATTTGGCCCCTA | C/T |
| 18 | −72 | GCCCAGTCAC | G/A |
| 18 | −63 | CGCCATTGCC | C/T |
| 18 | −30 | GTGTGATGTT | G/A |
| 18 | +23 | TGATCTGGAGGAGG | T/C |
| 18 | +47 | GTCTGGGCAGCTTT | G/C |
| 18 | +54 | CACCGTCAGTGCT | C/A |
| 22 | −118 | GGCACCTGCC | G/A |

[0208] These splice variants may also produce an altered phenotype capable of conferring a HBM-like effect.

[0209] These mutations were identified using 80 ng of genomic DNA, which was PCR amplified with the primers indicated in Table 4 below with M13F (TGTAAAACGACGGCCAGT) attached to the 5′ end of the Forward primer or M13R (AGGAAACAGCTATGACCAT) attached to the 5′ end of the Reverse primer. 4 μl of the PCR reaction was diluted to a final volume of 100 μl with water. Sequencing was performed using ET and M13F and M13R primers or by the ABI-PRISM® Big-Dye™ method of Applied Biosystems using the indicated nested sequencing primers. The sequences are assembled on consed with the appropriate reference sequence.

[0210] The PCR mixes used are as follows
[0211] Promega: 50 mM KCl, 10 mM Tris-HCl, pH 9.0, 0.1% Triton X-100, 1.5 mM MgCl₂
[0212] Invitrogen D: 60 mM Tris-HCl, pH 8.5, 15 mM (NH₄)₂SO₄, 3.5 mM MgCl₂
[0213] Invitrogen J: 60 mM Tris-HCl, pH 9.5, 15 mM (NH₄)₂SO₄, 2.0 mM MgCl₂
[0214] Invitrogen M: 60 mM Tris-HCl, pH 10.0, 15 mM (NH₄)₂SO₄, 1.5 mM MgCl₂

[0215] To all the PCT mixes, 120 μM of all 4 dNTPs was added, 0.4 μM of the forward and reverse primers, 80 ng genomic DNA, 1 U of AmpliTaq® DNA polymerase, and 1.1 U of TaqStart antibody (Clontech). The PCR reaction is than run as follows: 94° C., 2 min; (94° C., 30 sec; X-anneal-temp, 30 sec; 72° C., 2 min) for 35 cycles and 72° C. for 3 min.

TABLE 4

Forward and Reverse Primers

| | | | anneal | Prod. | PCR | | |
|---|---|---|---|---|---|---|---|
| Exon | F-primer (PCR) | R-primer (PCR) | temp | Size | buffer | F-primer (seq) | R-primer (seq) |
| 1 | GAGACGCGGCGCGGCTTC | CGCCCCAACTCGCTCCCA | 2- | 429 | dmso | TCCCGCGCGCCCAGCTC | TCGCCAAGTCGCTTCCG |
| | | AC | cycle- | | | | |
| | | | 68 | | | | |
| 2 | AAGGAACTGGAGGTCTTG | CAGAGTCACACCCTTTTT | 62 | 670 | promega | GGCATGGGCAGGGCAGT | TGAAAAACAACTTGGGC |
| | | C | | | | | TC |
| 3 | CCAAGTTCTGAGAAGTCC | AATACCTGAAACCATACC | 58 | 523 | promega | TGCATTCCTCAGGGCCC | TTGGTTATTTCCGATGG |
| | | TG | | | | | G |
| 4 | GGCGTAGTGGTGGGCATC | CCCAGCCAGCCACACACC | 62 | 680 | dmso | ACTGTCGGGGGACCCTC | ATTGCAGCAGGTACCCC |
| | AG | TC | | | | | |
| 5 | GGGAAATTGCAGGCCGTC | CTGAGGACCAAGGCGGAG | 58 | 633 | promega | AGGCTGAGGGCCCCATG | CAGGATTGACCTCCTGG |
| | TG | AG | | | | | |
| 6 | CACCTAACATCACCAGCC | GATGCAAGACAGTGTCCC | 62 | 672 | promega | CCTGGCTGAGTATTTCC | TCAATCTCCCTCTCGCC |
| 7 | ACACCGACATTTACGAGC | AAATAGCAGAGCACAGGC | 58 | 484 | promega + | CGACATTTACTGACACC | CCATCGGTGCCTCGCCA |
| | AC | AC | | | 10% dmso | A | |
| 8 | TCTCAAACAAACAAACAA | TCCTTGGCCAGATACTGT | 60 | 638 | promega | ACAAACAAACAAAGCGT | CTTTCCTGTCCTGCCCT |
| | ACAAAAA | CAC | | | | CA | |
| 9 | TGTGTGGCGGGAATAAAG | TTGAGGCAGGAACAGAGG | 60 | 648 | promega | CTGTGCACATTGGAGCT | CAAGGTTTTCCCATAAA |
| | | | | | | | GG |
| 10 | ATGTCTACAAAACACGCT | CTAATCACTGAGGGCCAC | 60 | 744 | promega | GTTCTGGCCTGGCGTGG | ACGGACAGCCTGCCACC |
| | G | | | | | | |
| 11 | TCACCTTACGAGTGAGCC | AGCCTCTCCCGACATAAC | 60 | 677 | promega | ACTGTGGGAATTCAGGG | TGCAGCAAAGGCACCCA |
| 12-1 | GAAAACCAGCAAAAGCCC | TGTCCATCACGAAGTCCA | 60 | 677 | promega | ATGAGGGCGGCCATGTG | GCGGTTCCGGCCGCTAG |
| | | G | | | | | |
| 12-2 | ACAGCGATTATATCTACT | ATGGAAAGCACTCAGCAC | 60 | 622 | promega | AGACTGGAATCTGCACA | TGTGCTGGCAGTATGAG |
| | GGAC | | | | | G | |
| 13 | AGAATGAAATTCCCCATA | AGACAAAAGTCCTGTGGG | 52 | 676 | Invitrogen D | TCCCGTGGACCTCCAGC | ACAACGGGGAAACCCAG |
| | GCG | GTC | | | | | |
| 14 | GAGAGACCCCCACACCAA | CAGGTGGAAAGTCTCCCC | 63 | 571 | promega | TGGGATTTGACTTTCAG | CCTGTGAGAGGCTGGCA |
| | TAC | AG | | | | G | |
| 15 | CAGTTGGATTTAGGGCCT | CAGCTGTCAGTGTGAGGA | 60 | 656 | promega | CTCACCCATTGTGGTCG | AACACGCTACACACAAA |
| | ACC | CAA | | | | | G |
| 16 | AACTGATGGCCTTCATCC | TCTTAAAACGCTGTTCGT | 60 | 699 | promega | GAGCCCAGCCCAGGTGG | GATTTGTTCTGCGGCAA |
| | C | GGT | | | | | AAG |
| 17 | AGACTGATGGTATGGGCA | ATTTGTGAGATGCAGGAA | 60 | 662 | promega | TAGAGACTGGTGCAGAC | CAGTACTTAGAGGAAAA |
| | CAG | ACG | | | | | TTC |
| 18 | ATTCTCCCAGCCTCTCTT | GCAGGAAGGTGAGATAGA | 58 | 722 | promega | GGTTGGGGCTGGAGGTG | TCACAGTCTGCCTTCAA |
| | CTG | CCC | | | | | G |
| 19 | GGGGTCTGTTACTCCTTG | CAGCTCACAGTCTGTCCT | 60 | 645 | promega | GGCGTAGACCTCCCCAC | CCGCTGCCCTGGGAAAG |
| | CAT | CCT | | | | | |
| 20 | ACGTTACCCTGAGGTTGG | AGGCCTCTGTGTTGAAGG | 60 | 640 | promega | AGGCTCCCCAGGCCTAG | CTGATGCCAAGCACAGG |
| | C | ATT | | | | | |
| 21 | TTGGAGGAGGTACCATGT | GGTGGATTTGGGTGAGAT | 55 | 643 | Invitrogen J | TCCCGTTTCACAGATGA | CAGATTATCCACAATCA |
| | GTC | TTT | | | | G | AC |
| 22 | TTCTGCTGATTTCTGAAC | TTGCCTTTCACTGAGATG | 58 | 558 | promega + | AACATGCAGTGCCCGCT | CTTCGGGGCAGGTGGCT |
| | CC | AC | | | 10% dmso | | |
| 23 | GGCCTGCATCTTCTGGAG | CATTCCCTCCACGGGGAC | 62 | 683 | promega | TGGCCAGTGGACAGGCC | ACACAACTCAAATGCAC |
| | C | | | | | | AC |

4. Genotyping, of Microsatellite Markers

[0217] To narrow the genetic interval to a region smaller than that originally reported by Johnson et al., 1997 Am. J. Hum. Genet., 60:1326-1332, additional microsatellite markers on chromosome 11q12-13 were typed. The new markers included: D11S4191, D11S1883, D11S1785,D11S4113,D11S4136,D11S4139,(Dib et al., 1996 Nature, 380:152-154), FGF3 (Polymeropolous et al., 1990 Nucl. Acid Res., 18: 7468), as well as GTC_HBM_Marker_{—}1, GTC_HBM_Marker_{—}2, GTC_HBM_Marker_{—}3, GTC_HBM_Marker_{—}4, GTC_HBM_Marker_{—}5, GTC_HBM_Marker_{—}6, and GTC_HBM_Marker_{—}7 (See FIG. 2).

[0218] Blood (20 ml) was drawn into lavender cap (EDTA containing) tubes by a certified phlebotomist. The blood was stored refrigerated until DNA extraction. DNA has been extracted from blood stored for up to 7 days in the refrigerator without reduction in the quality or quantity of yield. For those subjects that have blood drawn at distant sites, a shipping protocol was successfully used on more than a dozen occasions. Blood samples were shipped by overnight express in a styrofoam container with freezer packs to provide cooling. Lavender cap tubes were placed on individual plastic shipping tubes and then into “zip-lock” biohazard bags. When the samples arrived the next day, they were immediately processed to extract DNA.

[0219] The DNA extraction procedure used a kit purchased from Gentra Systems, Inc. (Minneapolis, Minn.). Briefly, the procedure involved adding 3 volumes of a red blood cell lysis buffer to the whole blood. After incubations for 10 minutes at room temperature, the solution was centrifuged in a Beckman tabletop centrifuge at 2,000×g for 10 minutes. The white blood cell pellet was resuspended in Cell Lysis Buffer. Once the pellet was completely resuspended and free of cell clumps, the solution was digested with RNase A for 15 minutes at 37° C. Proteins were precipitated by addition of the provided Protein Precipitation Solution and removed by centrifugation. The DNA was precipitated out of the supernatant by addition of isopropanol. This method was simple and fast, requiring only 1-2 hours, and allowed for the processing of dozens of samples simultaneously. The yield of DNA was routinely >8 mg for a 20 ml sample of whole blood and had a MW of >50 kb. DNA was archived by storing coded 50 μg aliquots at −80° C. as an ethanol precipitate.

[0220] DNA was genotyped using one fluorescently labeled oligonucleotide primer and one unlabeled oligonucleotide primer. Labeled and unlabeled oligonucleotides were obtained from Integrated DNA Technologies, Inc. (Coralville, Iowa). All other reagents for microsatellite genotyping were purchased from Perkin Elmer-Applied Biosystems, Inc. (“PE-ABI”) (Norwalk, Conn.). Individual PCR reactions were performed for each marker, as described by PE-ABI using AmpliTaq™ DNA Polymerase. The reactions were added to 3.5 μl of loading buffer containing deionized formamide, blue dextran and TAMRA 350 size standards (PE-ABI). After heating at 95° C. for 5 minutes to denature the DNA, the samples were loaded and electrophoresed as described in the operator's manual for the Model 377 DNA Sequencer (PE-ABI, Foster City, Calif.). After gel electrophoresis, the data was analyzed using PE-ABI GENESCAN™ and GENOTYPER™ software. First, within the GENESCAN™ software, the lane tracking was manually optimized prior to the first step of analysis. After the gel lane data was extracted, the standard curve profiles of each lane were examined and verified for linearity and size calling. Lanes, which had problems with either of these parameters, were re-tracked and verified. Once all lanes were tracked and the size standards were correctly identified, the data were imported into GENOTYPER™ for allele identification To expedite allele calling (binning), the program Linkage Designer from the Internet web-site of Dr. Guy Van Camp (http://alt.www.uia.ac.be/u/dnalab/ld.html) was used. This program greatly facilitates the importing of data generated by GENOTYPER™ into the pedigree drawing program Cyrillic (Version 2.0, Cherwell Scientific Publishing Limited, Oxford, Great Britain) and subsequent linkage analysis using the program LINKAGE (Lathrop et al., 1985 Am. J. Hum. Genet. 37: 482-98).

[0221] 5. Linkage Analysis

[0222] FIG. 1 demonstrates the pedigree of the individuals used in the genetic linkage studies for this invention. Specifically, two-point linkage analysis was performed using the MLINK and LINKMAP components of the program LINKAGE (Lathrop et al., 1985 Am. J. Hum. Genet., 37: 482-98). Pedigree/marker data was exported from Cyrillic as a pre-file into the Makeped program and converted into a suitable ped-file for linkage analysis.

[0223] The original linkage analysis was performed using three models: (i) an autosomal dominant, fully penetrant model, (ii) an autosomal dominant model with reduced penetrance, and (iii) a quantitative trait model. The HBM locus was mapped to chromosome 11q12-13 by analyzing DNA for linked markers from 22 members of a large, extended kindred. A highly automated technology was used with a panel of 345 fluorescent markers which spanned the 22 autosomes at a spacing interval ranging from 6-22 cM. Only markers from this region of chromosome 11 showed evidence of linkage (LOD score ˜3.0). The highest LOD score (5.74) obtained by two-point and multipoint analysis was D11S987 (map position 55 in FIG. 2). The 95% coiifidence interval placed the HBM locus between markers D11S905 and D11S937 (map position 41-71 in FIG. 2). Haplotype analysis also places the Zmax1 (LRP5) gene in this same region. Further descriptions of the markers D11S987, D11S905, and D11S937 can be found in Gyapay et al., 1994 Nature Genetics, Vol. 7.

[0224] In this invention, the inventors report the narrowing of the HBM interval to the region between markers D11S9S7 and GTC_HBM_Marker_{—}5. These two markers lie between the delimiting markers from the original analysis (D11S905 and D11S937) and are approximately 3 cM from one another. The narrowing of the interval was accomplished using genotypic data from the markers D11S4191, D11S1883, D11S1785, D11S4113, D11S4136, D11S4139, (Dib et al., 1996 Nature 380: 152-4), FGF3 (Polymeropolous et al., 1990 Nucl. Acid Res., 18: 7468) (information about the genetic markers can be found at the Internet site of the Genome Database, http://gdbwww.gdb.org/), as well as the markers GTC_HBM_Marker_{—}1, GTC_HBM_Marker_{—}2, GTC_HBM_Marker_{—}3, GTC_HBM_Marker_{—}4, GTC_HBM_Marker_{—}5, GTC_HBM_Marker_{—}6, and GTC_HBM_Marker_{—}7.

[0225] As shown in FIG. 1, haplotype analysis with the above genetic markers identifies recombination events (crossovers) in individuals 9019 and 9020 that significantly refine the interval of chromosome 11 to which the Zmax1 (LRP5) gene is localized. Individual 9019 is an HBM-affected individual that inherits a portion of chromosome 11 from the maternal chromosome with the HBM gene, and a portion from the chromosome 11 homologue. The portion inherited from the HBM gene-carrying chromosome includes markers D11S935, D11S1313, GTC_HBM_Marker_{—}4, D11S987, D11S1296, GTC_HBM_Marker_{—}6, GTC_HBM_Marker_{—}2, D11S970, GTC_HBM_Marker_{—}3, D11S4113, GTC_HBM_Marker_{—}1, GTC_HBM_Marker_{—}7 and GTC_HBM_Marker_{—}5. The portion from D11S4136 and continuing in the telomeric direction is derived from the non-HBM chromosome. This data places the Zmax1 (LRP5) gene in a location centromeric to the marker GTC_HBM_Marker_{—}5. Individual 9020 is an unaffected individual who also exhibits a critical recombination event. This individual inherits a recombinant paternal chromosome 11 that includes markers D11S935, D11S1313, GTC_IBM_Marker_{—}4, D11S987,D11S1296 and GTC_HBM_Marker_{—}6 from her father's (individual 0115) chromosome 11 homologue that carries the HBM gene, and markers GTC_HBM_Marker_{—}2, D11S970, GTC_HBM_Marker_{—}3, GTC_HBM_Marker_{—}1, GTC_HBM_Marker_{—}7, GTC_HBM_Marker_{—}5, D11S4136, D11S4139, D11S1314, and D11S937 from her father's chromosome 11 that does not carry the HBM gene. Marker D11S4113 is uninformative due to its homozygous nature in individual 0115. This recombination event places the centromeric boundary of the HBM region between markers D11S1296 and D11S987.

[0226] Two-point linkage analysis was also used to confirm the location of the Zmax1 (LRP5) gene on chromosome 11. The linkage results for two point linkage analysis under a model of full penetrance are presented in Table 5 below. This table lists the genetic markers in the first column and the recombination fractions across the top of the table. Each cell of the column shows the LOD score for an individual marker tested for linkage to the Zmax1 (LRP5) gene at the recombination fraction shown in the first row. For example, the peak LOD score of 7.66 occurs at marker D11S970, which is within the interval defined by haplotype analysis.

TABLE 5

| Marker | 0.0 | 0.05 | 0.1 | 0.15 | 0.2 | 0.25 | 0.3 | 0.35 | 0.4 |
|---|---|---|---|---|---|---|---|---|---|
| D11S935 | infinity | 0.39 | 0.49 | 0.47 | 0.41 | 0.33 | 0.25 | 0.17 | 0.10 |
| D11S1313 | infinity | 2.64 | 2.86 | 2.80 | 2.59 | 2.30 | 1.93 | 1.49 | 1.00 |
| D11S987 | infinity | 5.49 | 5.18 | 4.70 | 4.13 | 3.49 | 2.79 | 2.03 | 1.26 |
| D11S4113 | 4.35 | 3.99 | 3.62 | 3.24 | 2.83 | 2.40 | 1.94 | 1.46 | 0.97 |
| D11S1337 | 2.29 | 2.06 | 1.81 | 1.55 | 1.27 | 0.99 | 0.70 | 0.42 | 0.18 |
| D11S970 | 7.66 | 6.99 | 6.29 | 5.56 | 4.79 | 3.99 | 3.15 | 2.30 | 1.44 |
| D11S4136 | 6.34 | 5.79 | 5.22 | 4.61 | 3.98 | 3.30 | 2.59 | 1.85 | 1.11 |
| D11S4139 | 6.80 | 6.28 | 5.73 | 5.13 | 4.50 | 3.84 | 3.13 | 2.38 | 1.59 |
| FGF3 | 0.59 | 3.23 | 3.15 | 2.91 | 2.61 | 2.25 | 1.84 | 1.40 | 0.92 |
| D11S1314 | 6.96 | 6.49 | 5.94 | 5.34 | 4.69 | 4.01 | 3.27 | 2.49 | 1.67 |
| D11S937 | infinity | 4.98 | 4.86 | 4.52 | 4.06 | 3.51 | 2.88 | 2.20 | 1.47 |

[0227] A single nucleotide polymorphism (SNP) further defines the HBM region. This SNP is termed SNP_Contig033-6 and is located 25 kb centromeric to the genetic marker GTC_HBM_Marker_{—}5. This SNP is telomeric to the genetic marker GTC_HBM_Marker_{—}7. SNP_Contig033-6 is present in HBM-affected individual 0113. However, the HBM-affected individual 9019, who is the son of 0113, does not carry this SNP. Therefore, this indicates that the crossover is centromeric to this SNP. The primer sequence for the genetic markers GTC_HBM_Marker_{—}5 and GTC_HBM_Marker_{—}7 is shown in Table 6 below.

TABLE 6

| | | |
|---|---|---|
| Marker | Primer (Forward) | Primer (Reverse) |

| | | |
|---|---|---|
| GTC_HBM_Marker_5 | TTTTGGGTACACAATTCAGTCG | AAAACTGTGGGTGCTTCTGG |
| | (SEQ ID NO: 63) | (SEQ ID NO:65) |
| GTC_HBM_Marker_7 | GTGATTGAGCCAATCCTGAGA | TGAGCCAAATAAACCCCTTCT |
| | (SEQ ID NO: 64) | (SEQ ID NO: 66) |

[0228] The kindred described have several features of great interest, notably that their bones, while very dense, have an absolutely normal shape. The outer dimensions of the skeletons of the HBM-affected individuals are normal, and, while medullary cavities are present, there is no interference with hematopoiesis. The HBM affected members seem to be resistant to fracture, and there are no neurologic symptoms, and no symptoms of impairment of any organ or system function in the members examined. HBM-affected members of the kindred live to advanced age without undue illness or disability. Furthermore, the HBM phenotype matches no other bone disorders such as osteoporosis, osteoporosis pseudoglioma, Engelmann's disease, Ribbing's disease, hyperphosphatasemia, Van Buchem's disease, melorheostosis, osteopetrosis, pycnodysostosis, sclerostenosis, osteopoikilosis, acromegaly, Paget's disease, fibrous dysplasia, tubular stenosis, osteogenesis imperfecta, hypoparathyroidism, pseudohypoparathyroidism, pseudopseudohypoparathyroidism, primary and secondary hyperparathyroidism and associated syndromes, hypercalciuria, medullary. carcinoma of the thyroid gland, osteomalacia and other diseases. Clearly, the HBM locus in this family has a very powerful and substantial role in regulating bone density, and its identification is an important step in understanding the pathway(s) that regulate bone density and the pathogenesis of diseases such as osteoporosis.

[0229] In addition, older individuals carrying the HBM gene, and therefore expression of the HBM protein, do not show loss of bone mass characteristic of normal individuals. In other words, the HBM gene is a suppressor of osteoporosis. In essence, individuals carrying the HBM gene are dosed with the HBM protein, and, as a result, do not develop osteoporosis. This in vivo observation is strong evidence that treatment of normal individuals with the HBM gene or protein, or a fragment thereof, will ameliorate osteoporosis.

[0230] 6. Physical Mapping

[0231] To provide reagents for the cloning and characterization of the HBM locus, the genetic mapping data described above were used to construct a physical map of the region containing Zmax1 (LRP5) on chromosome 11q13.3. The physical map consists of an ordered set of molecular landmarks, and a set of BAC clones that contain the Zmax1 (LRP5) gene region from chromosome 11q13.3.

[0232] Various publicly available mapping resources were utilized to identify existing STS markers (Olson et al., 1989 Science 245:1434-5) in the HBM region. Resources included the GDB, the Whitehead Institute Genome Center, dbSTS and dbEST (NCBI), 11 db, the University of Texas Southwestern GESTEC, the Stanford Human Genome Center, and several literature references (Courseaux et al., 1997 Genomics 40: 13-23; Courseaux et al., 1996 Genomics 37: 354-65; Guru et al., 1997 Genomics 42: 436-45; Hosoda et al., 1997 Genes Cells 2: 345-57; James et al., 1994 Nat. Genet. 8: 70-76; Kitamura et al., 1997 DNA Research, 4: 281-9; Lemmens et al., 1997 Genomics 44: 94-100; and Smith et al., 1997 Genome Res. 7: 835-42). Maps were integrated manually to identify markers mapping to the region containing Zmax1 (LRP5).

[0233] Primers for existing STSs were obtained from the GDB or literature references are listed in Table 6 below. Thus, Table 7 shows the STS markers used to prepare the physical map of the Zmax1 (LRP5) gene region.

TABLE 7

HBM STS Table

| | | | | | | | |
|---|---|---|---|---|---|---|---|
| | Locus | | | Size | SEQ ID NO: | SEQ ID NO: | |
| STS Name | Name | Type | GDB Access # | (kb) | Forward Primer | Reverse Primer | Gene Name |

| | | | | | | | |
|---|---|---|---|---|---|---|---|
| ACTN3 | | Gene | GDB: 197568 | 0.164 | 67: CTGGACTACGTGGCC | 68: TTCAGAAGCACTTGG | Actinin, |
| | | | | | TTCTC | CTGG | alpha 3- |
| | | | | | | | skeletal |
| | | | | | | | muscle |
| PC-B/PC-Y | | Gene | GDB: 197884 | 0.125 | 69: CTCAGTGCCATGAAG | 70: CAAGATCACTCGATC | Pyruvate |
| | | | | | ATGGA | TCCAGG | Carboxylase |
| | D1152161E | Gene | | 0.322 | 71: GTTTCAGGAGACTCA | 72: TTCTGCAGGTTGCTG | Adenosine |
| | | | | | GAGTC | TTGAG | Receptor (A2) |
| | | | | | | | Gene |
| ADRBK1 | | Gene | GDB: 4590179 | 0.117 | 73: TTATTGTGATTTCCC | 74: GCCCTCTGTCCTGAC | Beta- |
| | | | | | GTGGC | TTCAGG | adrenergic |
| | | | | | | | receptor |
| | | | | | | | kinase |
| PSANK3 | | Gene | | 0.259 | 75: GAGAAAGAAATAAGG | 76: TGCTTTGTAAAGCAC | sim. to Human |
| | | | | | GGACC | TGAGA | endogenous |
| | | | | | | | retrovirus |
| | | | | | | | mRNA long |
| | | | | | | | terminal |
| | | | | | | | repeat |
| PP1(1/2)/ | | Gene | GDB: 197566 | 0.208 | 77: GAAGTACGGGCAGTT | 78: ATACACCAAGGTCCA | Protein |
| PP1(2/2) | | | | | CAGTGGCCT | TGTTCCCCGT | phosphatase |
| | | | | | | | 1, catalytic |
| | | | | | | | subunit, |
| | | | | | | | alpha isoform |
| GSTP1.PCR1 | | Gene | GDB: 270065 | 0.19 | 79: AGCCTGGGCCACAGC | 80: TCCCGGAGCTTGCAC | Glutathione |
| | | | | | GTGAGACTACGT | ACCCGCTTCACA | S-transferase |
| | | | | | | | pl |
| NDUFV1 | | Gene | | 0.521 | 81: CATGTGCCCACCTCA | 82: CAAGATTCTGTAGCT | NADH |
| | | | | | TTCAT | TCTGG | dehydrogenase |
| | | | | | | | (ubiquinone) |
| | | | | | | | flavoprotein |
| | | | | | | | 1 (51 kD) |
| PSANK2 | | Gene | | 0.157 | 83: CAGAGAAGTCAAGGG | 84: ATCCTCTCACATCCC | Aldehyde |
| | | | | | ACTTG | ACACT | Dehydrogenase |
| | | | | | | | 8 (ALDH8) |
| PSANK1 | | EST | | 0.3 | 85: CAAGGCTAAAAGACG | 86: TCAGGAGCATTTCAT | Human ribo- |
| | | | | | AAAAA | CTTTT | somal protein |
| | | | | | | | L37 (PSANK1) |
| | | | | | | | pseudogene |
| UT5620 | D1151917 | MSAT | GDB: 314521 | 0.211 | 87: AAGTCGAGGCTGCAA | 88: GCCCTGTGTTCCTTT | |
| | | | | | GGAG | CAGTA | |
| AFM289ya9 | D1151337 | MSAT | GDB: 199805 | 0.287 | 89: AAGGTGTGAGGATCA | 90: AGCTCATGGGGGCTA | |
| | | | | | CTGG | TT | |
| GALN | | Gene | | 0.322 | 91: GCTTCTCCGAGTGTA | 92: ATGGCAGAGGACTTA | Preprogalanin |
| | | | | | TCAAC | GAACA | (GAL1) |
| pM551 | D11597 | VNTR | GDB: 177850 | | 93: GATCAGCGAACTTCC | 94: TCCACATTGAGGACT | |
| | | | | | TCTCGGCTC | GTGGGAACG | |
| BCL1(1)/ | | Gene | | 0.205 | 95: GCTAATCACAGTCTA | 96: TTGCACTGTCTTGGA | B-cell CLL/ |
| BCL1(2) | | | | ACCGA | TGCA | lymphoma 1 - | |
| | | | | | | | Cyclin D1 |
| | | | | | | | (PRAD1 gene) |
| CCND1 | | Gene | GDB: 4590141 | 0.248 | 97: GCACAGCTGTAGTGG | 98: CAGGCGCAAAGGACA | Cyclin D1 |
| | | | | | GGTTCTAGGC | TGCACACGGC | |
| FGF4 | | Gene | GDB: 4590113 | 0.549 | 99: CACCGATGAGTGCAC | 100: CAGACAGAGATGCT | Fibroblast |
| | | | | | GTTCAAGGAG | CCACGCCATAC | growth factor |
| | | | | | | | 4 |
| FGF3.PCR1 | | Gene | GDB: 188627 | 0.161 | 101: TTTCTGGGTGTGTC | 102: ACACAGTTGCTCTA | Fibroblast |
| | | | | | TGAAT | AAGGT | growth factor |
| | | | | | | | 3 |
| AFM164ZF12 | D115913 | MSAT | GDB: 188151 | 0.22 | 103: CATTTGGGAAATCC | 104: TAGGTGTCTTATTT | |
| | | | | | AGAAGA | TTTGTTGCTTC | |
| AFMA190YD5 | | MSAT | GDB: 1222329 | 0.275 | 105: GACATACCATGAAC | 106: CAACCCATACCAGG | |
| | | | | | ACTATAAGAGG | GATAAG | |
| SHGC-15295 | D1154689 | STS | GDB: 740600 | 0.147 | 107: GAACAAGAGGGGTA | 108: TGAGGACACAGATA | |
| | | | | | AGTTGGC | CTGGATGGG | |
| SHGC-3084 | D1154540 | STS | GDB: 740102 | 0.167 | 109: GAAGTGTTCCCTCT | 110: GAACTATATTGTAG | |
| | | | | | TAAATTCTTTG | TTAGTGAGGAG | |
| SHGC-14407 | D1154664 | STS | GDB: 740516 | 0.158 | 111: CCTGTAACCCCCAG | 112: TCTTGCTTCCTAAG | |
| | | | | | TCCC | TTTCTCGG | |
| SHGC-10946 | D1154327 | Gene | GDB: 674522 | 0.311 | 113: ACTCCATCCACCTC | 114: TGCTGTTTGCCTCA | Choline |
| | | | | | ATCACTG | TCTGAC | Kinase |
| 5515 | D115703 | STS | GDB: 196290 | 0.166 | 115: GTGGACAGGCATAG | 116: TGTTCACTCTTCTG | |
| | | | | | CTGAGG | CCTGCAG | |
| AFM147XD10 | D1151889 | MSAT | GDB: 307895 | 0.183 | 117: AGCTGGACTCTCAC | 118: CAAGAGGCTGGTAG | |
| | | | | | AGAATG | AAGGTG | |
| AFMA131YE5 | D115987 | MSAT | GDB: 195002 | 0.082 | 119: GACTCCAGTCTGGG | 120: GTGGCAGCATGACC | |
| | | | | | CAATAAAAGC | TCTAAAG | |
| AFMb358xa9 | D1154178 | MSAT | GDB: 611922 | 0.237 | 121: CAGGCCCAGTCTCT | 122: CGTGTCCAGATGAA | |
| | | | | | TG | AGTG | |
| AFMa272yb5 | D1154113 | MSAT | GDB: 608115 | 0.218 | 123: ACCTCACGGTGTAA | 124: CTTGAAGCCCATCT | |
| | | | | | TCCC | TTGC | |
| WI-17803 | | EST | GDB: 4581644 | 0.15 | 125: TATTTGCAAAGCTT | 126: AATCACTGTGCTTT | |
| | | | | | GAGACTTCT | GTTGCC | |
| SGC31923 | | EST | GDB: 4578606 | 0.126 | 127: ACTTTATTGTCAGC | 128: ACTCCCTCGATGGC | |
| | | | | | GTGGGC | TTCC | |
| WT-7741 | D1154364 | GENE | GDB: 677652 | 0.324 | 129: GAGCAGGGGAGAGA | 130: CCCAACTGGCTTGT | Trans- |
| | | | | | AGGC | TTTATTG | formation- |
| | | | | | | | sensitive |
| | | | | | | | protein IEF |
| | | | | | | | SSP 3521 |
| SGC35223 | | EST | GDB: 4582598 | 0.13 | 131: AGCCACTTTATTGT | 132: AAGAGTGAACAAAA | ZNF162— |
| | | | | | TATTTTGATGC | GCAAACATACC | splicing |
| | | | | | | | factor 1 |
| WI-16754 | | EST | GDB: 4578377 | 0.15 | 133: GTGGAGTGTGGGAT | 134: TACTGTTCTTGATA | |
| | | | | | TGGG | AGTATGTCGGC | |
| WI-6315 | D1154418 | EST | GDB: 678804 | 0.224 | 135: ATGCTTTTGCATGA | 136: TCCCCCAAAAGAAT | |
| | | | | | TTCTAATTATT | GTAAACG | |
| WI-16915 | | EST | GDB: 4584055 | 0.125 | 137: CTGGTCTTCCTTGT | 138: ATCACCCAGGCCAG | Mitogen |
| | | | | | GTGCTG | GGAT | inducible |
| | | | | | | | gene (MIG-2) |
| SGC30608 | | EST | | 0.128 | 139: TCAGAAGCAGAACT | 140: CCTGCTTGAAAGTT | |
| | | | | | GTTTTTAACA | CTAGAGCC | |
| WI-17663 | | EST | GDB: 4583346 | 0.126 | 141: CAAGCCGGGTTTTA | 142: GATGCCAGGACCAT | |
| | | | | | TTGAAA | GGAC | |
| WI-6383 | | Gene | GDB: 1222237 | 0.199 | 143: GCATATAGAAACAA | 144: CTCTGAAGCAGGGA | Human tat |
| | | | | | TTTATTGCCG | CCAGAG | interactive |
| | | | | | | | protein |
| | | | | | | | (TIP60) |
| SGC31567 | | Gene | GDB: 4578432 | 0.297 | 145: CTACCACACCACAC | 146: CAAGCGAAAGCTGC | Calcium |
| | | | | | CAGGC | CTTC | activated |
| | | | | | | | neutral |
| | | | | | | | protease |
| | | | | | | | large sub- |
| | | | | | | | unit, muCANP, |
| | | | | | | | calpain |
| SGC30658 | | EST | GDB: 4584037 | 0.15 | 147: GTTGTCTTGACTTC | 148: TTTTCCTTCAACAA | |
| | | | | | AGGTCTGTC | TCACTACTCC | |
| SGC34590 | | EST | | 0.13 | 149: GCGTGGGGATATAG | 150: TACGTGGCCAAGAA | |
| | | | | | AGGTCA | GCTAGG | |
| SGC33927 | | EST | GDB: 4582382 | 0.15 | 151: TAATATATCCCCAG | 152: AGCTTGCAGATGGA | |
| | | | | | TCTAAGGCAT | GCCC | |
| WI-8671 | | EST | GDB: 1222235 | 0.124 | 153: TGGTTTTAAACCTT | 154: TGTTGATCTATACC | |
| | | | | | TAATGAGAAAA | CTGTTTCCG | |
| WI-12334 | | EST | GDB: 1222257 | 0.127 | 155: AATTATTTAAAAGA | 156: TGGCTGTGAACTTC | |
| | | | | | GAGGAAAGGCA | CTCTGA | |
| WI-18402 | | EST | GDB: 4581874 | 0.113 | 157: GGTTACAGAAAAAC | 158: TGAGCTTTAGTTCC | |
| | | | | | ATTTGAGAGAT | CTTCTCTG | |
| WI-18671 | | EST | GDB: 4584947 | 0.131 | 159: TTGAAAAACCATTT | 160: TCTGCGGCTGTTGG | Hlark |
| | | | | | ATTTCACCG | ATTT | |
| WI-12856 | | EST | GDB: 4576606 | 0.209 | 161: TTGAAAAACCATTT | 162: TGTTCTCTTCTCCC | Hlark |
| | | | | | ATTTCACCG | AGCAGG | |
| SGC33767 | | EST | GDB: 4581106 | 0.15 | 163: CTTTATTGAAAACA | 164: TTGTCAAATTCCCC | |
| | | | | | TTGAGTGCA | CCAAAA | |
| AFM343YB5 | | MSAT | GDB: 1222332 | 0.181 | 165: AAACCACGACCNCC | 166: CCCTGGAAAGGTAA | |
| | | | | | A | GATGCT | |
| SGC33744 | | EST | GDB: 4575826 | 0.15 | 167: CTTTTGGTAGAGAC | 168: TATCTGTCTGTAGT | |
| | | | | | AAGGTCTCA GCTTCAAATGT | | |
| SGC32272 | | EST | GDB: 4581592 | 0.135 | 169: GACGAAGGTGATTC | 170: ACTGAAGAACTCTT | |
| | | | | | AGGGC | GTCCT | |
| SGC34148 | | EST | GDB: 4583084 | 0.1 | 171: CAGATAAAAGAGTC | 172: CACTTCTCCCACTT | |
| | | | | | ACTATGGCTCA | TGTCCC | |
| WI-18546 | | EST | GDB: 4574598 | 0.133 | 173: TTATTGATAAGCAT | 174: TGGCAAGTTAGGCA | Human 1.1 |
| | | | | | TAGTGAACCCC | CAGTCA | kb mRNA |
| | | | | | | | upregulated |
| | | | | | | | in retinoic |
| | | | | | | | acid treated |
| | | | | | | | HL-60 neutro- |
| | | | | | | | phillic cells |
| SGC31103 | | EST | GDB: 4567265 | 0.1 | 175: CTATGCCCAGAGAT | 176: TCCACTAAGGGCTA | |
| | | | | | GAACAGG | TGTCGC | |
| SGC30028 | | Gene | GDB: 4580505 | 0.128 | 177: GCCAGCTTTATTGA | 178: CACTGGAGACTACA | Human |
| | | | | | GTAAACTTCC | AGTGGTGG | pyruvate |
| | | | | | | | carboxylase |
| | | | | | | | precursor |
| WI-2875 | D1154407 | STS | GDB: 678546 | 0.125 | 179: CATCCCAACCATCA | 180: GGGGACTAGCTTAC | |
| | | | | | CTCAGT | AGATTTGA | |
| SGC36985 | | Gene | GDB: 4577182 | 0.223 | 181: AGACTACATTTTGG | 182: TGAAAGGATATTTA | LAR- |
| | | | | | AACCAGTGG | TAGCCTGGA | interacting |
| | | | | | | | protein 1b |
| GCT16807 | D1154270 | STS | GDB: 626245 | 0.137 | 183: GAAGGTTTTGTCCC | 184: TGAGGGTTGGGAAG | |
| | | | | | TCGATC | ATCATA | |
| WI-6504 | D1153974 | EST | GDB: 588142 | 0.174 | 185: CCTTCATAGCCACA | 186: CAGCTAACTGTTGA | |
| | | | | | CCCG | CATGCCA | |
| SGC31049 | | EST | GDB: 4580093 | 0.15 | 187: TCTTTACTGTGCTT | 188: CAACAGTGCAGTCG | |
| | | | | | ACAACTTTCCT | GTATCG | |
| TIGR- | | EST | GDB: 12222193 | 0.199 | 189: AGATCAGCAAGCAG | 190: CATTCCACATGGAT | NDUFV1 |
| AD02117 | | | | | ATAG | AGAC | |
| WI-5996 | D1152382 | EST | GDB: 458683 | 0.1 | 191: CATACCTATGAGGT | 192: GCATTTTCTCATCA | amplaxin |
| | | | | | GTGCTACAGG | TCCTTGC | (EMS1) |
| WI-16987 | | EST | GDB: 4575848 | 0.15 | 193: TTACAGCCACCAAG | 194: AGGTGTGTGTGCCA | Nuclear |
| | | | | | GTTTCC | GGTTGA | mitotic |
| | | | | | | | apparatus |
| | | | | | | | protein 1, |
| | | | | | | | NUMA |
| SGC31912 | | EST | GDB: 4567868 | 0.101 | 195: CACTGTTATCTCAT | 196: TTTGATTTTGTGTC | |
| | | | | | TAACTGTGAGG | TCCCAAA | |
| WI-13500 | | EST | GDB: 4577893 | 0.15 | 197: CCCCACTCCCACTT | 198: CCAGTCACCTTTAC | |
| | | | | | TTATT | TAGTCCTTG | |
| CHLC.GAAT1B01. | D115971 | MSAT | GDB: 684255 | 0.103 | 199: AGGACACAGCCTGC | 200: ACCAGGCATTGCAC | |
| P7933 | | | | | ATCTAG | TAAAAG | |
| SGC35519 | | Gene | GDB: 4577180 | 0.134 | 201: GATGGGTCACACTA | 202: ACATTTATATTTGG | LAR- |
| | | | | | ACCTGTCA | ACATGCAACC | interacting |
| | | | | | | | protein 1a |
| | | | | | | | mRNA |
| WI-11974 | | EST | GDB: 1222255 | 0.108 | 203: AGCATCTTTAATGT | 204: ATGTGCTGGGCTGG | Carnitine |
| | | | | | GTCAGGCA | AAAG | palmitoyl |
| | | | | | | | transferase 1 |
| WI-15244 | | Gene | GDB: 4574740 | 0.108 | 205: TCACATTCAAAAAT | 206: CTGCCTGTGTGGTG | Beta- |
| | | | | | CGGCAA | TCGC | adrenergic |
| | | | | | | | receptor |
| | | | | | | | kinase 1, |
| | | | | | | | ADRB1 |
| WI-17496 | | EST | GDB: 4583336 | 0.131 | 207: TCTTTTATTTCTCA | 208: GACCTCCTGTGACA | |
| | | | | | GTACAAAGCCA | CCACG | |
| WI-9159 | D1154381 | EST | GDB: 678144 | 0.111 | 209: CCACCAAATTATTT | 210: GTAAGATTCTCCAC | FGF4 |
| | | | | | ATAGTTCTGCG | TGTTGCACC | |
| WI-4232 | | STS | GDB: 1222250 | 0.175 | 211: CCTATAATGGGCTG | 212: ACTCCTCATGTGAA | |
| | | | | | ACCAA | GTCACCG | |
| SHGC-4167 | | EST | GDB: 4566789 | 0.161 | 213: CAGTGTGCACGTTT | 214: CAGCATCTTCAGCA | Human DNA |
| | | | | | TCATTT | CTTACC | helicase gen |
| | | | | | | | (SMBP2) |
| WI-14303 | | EST | GDB: 4576938 | 0.15 | 215: CTGCATTTATTATG | 216: TGCTGCTGGGAGTC | |
| | | | | | AGAATCAACAG | AGAGTC | |
| WI-16597 | | EST | GDB: 4585666 | 0.13 | 217: CAGGGCACTGAGAT | 218: AAGGATCAAGCAGG | |
| | | | | | ACACTTACC | CATTTG | |
| RC2951CATTFOR/ | D115970 | MSAT | GDB: 191084 | 0.15 | 219: ACACATCTCTTCTG | 220: TGAACCCTGGAGGC | |
| RC2951CATTREV | | | | | TGCCCC | AGAG | |
| UT979 | D1151296 | MSAT | GDB: 198525 | 0.362 | 221: CATTCCCCAGTTTG | 222: GTGCTGGGATTACA | |
| | | | | | CAGAC | GGTGT | |
| 1281/1282 | D1151059E | EST | GDB: 335216 | 0.07 | 223: GCAGAGAAGTCCTG | 224: CCATGCTAGAGAAG | |
| | | | | | TTAGCC | CACAAC | |
| D115468 | D115468 | STS | | 0.096 | 225: AGTGTGGGGCAGGA | 226: CAGACAGATAGCCC | |
| | | | | | CCTCTG | TGGGTTC | |
| D115668 | D115668 | STS | GDB: 179349 | 0.143 | 227: TCCCTCATCCCCTT | 228: AGCCCCCCTGGGGA | |
| | | | | | GTCTGT | TAATC | |
| RH18048 | | Gene | GDB: 4572853 | 0.188 | 229: GATGCTTACCTACC | 230: AGGATTCCTATCTG | Aldehyde |
| | | | | | ACGGC | GGCTATG | dehydrogenase |
| | | | | | | | (ALDH8) |
| IGHMBP2 | | Gene | GDB: 4590087 | 0.699 | 231: TGGCAGACCATGCT | 232: GAGAAGGCCGGGAG | Human DNA |
| | | | | | CCGCCT | GCTCTG | helicase gen |
| | | | | | | | (SMBP2) |
| NUMA | | Gene | GDB: 4590244 | 0.277 | 233: CTCCATCACAACCA | 234: GGGTGTGAGCTGCT | Nuclear |
| | | | | | GATTTGAGGCT | GCTGAAGG | mitotic |
| | | | | | | | apparatus |
| | | | | | | | protein 1, |
| | | | | | | | NUMA |
| KRN1 | | Gene | GDB: 4590232 | 0.228 | 235: AGTGGGAAACCTCA | 236: CAGTTTGGCTCAGA | High sulphur |
| | | | | | GGTAGCTCCCGA | CATATGGGGGCA | keratin, KRN |
| Cda1ff06 | D1152302E | EST | GDB: 455887 | 0.091 | 237: CATTAAGTAGTGGG | 238: CAAAGCGACAGTGA | |
| | | | | | GGGACAG | GTTAGGG | |
| RH10753 | | Gene | GDB: 4563588 | 0.194 | 239: GGAGTAGACCATGA | 240: CATGGTCTATTTAT | protein |
| | | | | | TTACTG | TCTCG | phosphatase |
| | | | | | | | 2A, PP2A |
| EMS | | Gene | GDB: 459016 | 0.64 | 241: CGCCCTGGATCCTC | 242: GGGCATCAGGGGAT | Amplaxin |
| | | | | | ACACTACA | GGGTAGA | |
| SHGC-11098 | DXS9736 | Gene | GDB: 737674 | 0.137 | 243: GCTCCTATCTGTGT | 244: CCGTGGCATAAGAT | Androgen |
| | | | | | TTTGAATGG | AAGTAAACG | Receptor |
| INPPL1 | | Gene | GDB: 4590093 | 0.382 | 245: CTTGGAGCGCTATG | 246: ATGGCAACTGACCT | 51C protein, |
| | | | | | AGGAGGGC | TCCGTCCTG | Inositol |
| | | | | | | | polyphosphate |
| | | | | | | | phosphatase- |
| | | | | | | | like 1 |
| RH18051 | | EST | GDB: 4572859 | 0.195 | 247: TTGGAGTCACAGGG | 248: CAGCACTATCCTTG | NOF1 |
| | | | | | GC | GGG | |
| Cda1cc11 | D1152297E | EST | GDB: 45869 | 0.1 | 249: AACAAAGCTGCTTA | 250: GATGAGGACCAACT | |
| | | | | | GCACCTG | GGTGAC | |
| 1249/1250 | D1151957E | EST | GDB: 335210 | 0.247 | 251: TTTTCCAATAATGT | 252: CAATCCCAACCGTA | |
| | | | | | GACTTC | ACAGGC | |
| NDUFV1 | D1152245E | EST | GDB: 445695 | | 253: CTTGATCTCGCCCA | 254: GCTCGCTGAAGGAT | NDUFV1 |
| | | | | | GGAAC | GAAGAC | |
| AFMb032zg5 | D1154136 | MSAT | GDB: 609546 | 0.19 | 255: GAATCGCTTGAACC | 256: CCAGGTGGTCTTAA | |
| | | | | | CAG | CGG | |
| AFMa059xg9 | D1155196 | MSAT | GDB: 614025 | 0.2 | 257: GAACGTTNTTCATG | 258: TAATGGTCGCTGTC | |
| | | | | | TAGGCGT | CC | |
| Cda17c12 | D1152288E | EST | GDB: 445842 | 0.158 | 259: AGGGAAAATGGTAT | 260: GCATGTGTGAAGGC | |
| | | | | | GTGGGGAG | AGG | |
| SHGC-1364 | D115951E | EST | GDB: 4562765 | 0.137 | 261: AGTGGACAAAATGA | 262: CCAACACAGTTTGC | |
| | | | | | GGAAAACAGG | TCACATGCC | |
| RH17410 | | EST | GDB: 4571587 | 0.126 | 263: TGACATCTTTGCAT | 264: AGTTATCCCACCTG | |
| | | | | | TATGGC | ATACCG | |
| RH17414 | | EST | GDB: 4571595 | 0.121 | 265: AGCTCTTGCTTCTC | 266: CAAAAGTTGTTTCT | |
| | | | | | AGTCCA | GTGTTTGTTC | |
| RH1770 | | EST | GDB: 4572301 | 0.267 | 267: GCCTCTCAAAGTAG | 268: TGTGTATCCATAGT | |
| | | | | | TTGGAACC | GCAAAACAG | |
| SEA | | EST | GDB: 4590169 | 0.13 | 269: CTCAAGGCCAGGCA | 270: GGACTCTTCCATGC | S13 avain |
| | | | | | TCACT | CAGTG | erythro- |
| | | | | | | | blastosis |
| | | | | | | | oncogene |
| | | | | | | | homolog |
| RH10689 | | EST | GDB: 4563460 | 0.107 | 271: AATGATGATCTCAA | 272: ACTGAAGAACTCTT | |
| | | | | | CTCTG | GTCCT | |
| TIGR-A006P20 | | EST | GDB: 4587692 | 0.236 | 273: GACATCTGTTAGTC | 274: GGTAACAGTGTCTT | |
| | | | | | TCATAATTC | GCTT | |
| TIGR-A007D15 | | Gene | GDB: 4588398 | 0.24 | 275: CATTGTACAAAACA | 276: ATCCTAGTTTCCTC | Menin gene |
| | | | | | GGAAGAG | TCCTT | (MEN1) |
| TIGR-A008K14 | | EST | GDB: 4588882 | 0.143 | 277: GTAAATGAGAAACA | 278: CTATTGGATGTGAT | |
| | | | | | GACAAATGA | ATGTTATGG | |
| TIGR-A008K11 | | EST | GDB: 4589094 | 0.203 | 279: AAGTAGAAACAAAA | 280: CCTACCCCAAGGTA | |
| | | | | | TGAGGGAC | ACAG | |
| TIGR-A008P15 | | EST | GDB: 4589662 | 0.182 | 281: ACTTCCTATAAATG | 282: GAGGAGCTTCAAGA | |
| | | | | | GAGGTGAG | GGAA | |
| TIGR-A00BT11 | | EST | GDB: 4589278 | 0.138 | 283: CATACTCCTAGACT | 284: GAATGATGTACATG | |
| | | | | | CAAGGAATC | AATTCTCTTTG | |
| TIGR-A00BU48 | | EST | GDB: 4589364 | 0.107 | 285: GTGTTGAGGAGAAA | 286: CTCCCAGTCACATT | |
| | | | | | AGCACT | C | |
| TIGR-A008X45 | | EST | GDB: 4589838 | 0.242 | 287: CAAGTTACAAATAA | 288: CAAGACCCTATCTC | |
| | | | | | CTTAAGCCG | TACAAAAAC | |
| SHGC-11839 | D1154611 | Gene | GDB: 740339 | 0.151 | 289: TTTATTAGAAGTGA | 290: GACTACCTGCCCTC | Folate |
| | | | | | CTCTTGGCCC | AGCTTG | receptor 2 |
| | | | | | | | (FBP2) |
| NIB1242 | D1154929E | EST | GDB: 3888276 | 0.149 | 291: TTCTCATGTACAAA | 292: CCACTGGCTTCTCT | cGMP- |
| | | | | | GCGGTC | CTTTTT | stimulated |
| | | | | | | | 3′,5′-cyclic |
| | | | | | | | nucleotide |
| | | | | | | | phospho- |
| | | | | | | | diesterase |
| | | | | | | | PDE2A3 |
| | | | | | | | (PDE2A) |
| SHGC-13599 | D2251553 | Gene | GDB: 737558 | 0.147 | 293: CACCAGAAGGTTGG | 294: ACTATTACGACATG | Macrophage |
| | | | | | GGTG | AACGCGG | Migration |
| | | | | | | | Inhibitory |
| | | | | | | | factor |
| SHGC-11867 | D1154331 | Gene | GDB: 674684 | 0.14 | 295: CTCTGCTGGATGAC | 296: TTGCCTTTCTTGAA | P2U |
| | | | | | CCC | ACTTAATTCC | Purinoceptor |
| SHGC-15349 | D1252124 | EST | GDB: 740819 | 0.141 | 297: TCACAGCCTTCAGT | 298: ACATGCTGTGGCAC | |
| | | | | | CAGGG | CATG | |
| Bda84a05 | D1152235E | EST | GDB: 445662 | 0.095 | 299: CCTGAGCTACTGCC | 300: CCCTGACTTGGACA | |
| | | | | | ACAG | GTGTCC | |
| Bda99d07 | D1152238E | EST | GDB: 445674 | 0.09 | 301: TCAGAGTCACTCCT | 302: CAAATTCAAGCTCA | |
| | | | | | GCCC | TCCAGACC | |
| folr1 | | Gene | GDB: 197840 | 0.3 | 303: CGGCATTTCATCCA | 304: GGTGTAGGAGGTGC | Folate |
| | | | | | GGAC | GACAAT | receptor 2 |
| | | | | | | | (FBP3) |
| NIB1738 | D1154284 | EST | GDB: 626260 | 0.173 | 305: TTCCATTTATTGAG | 306: CTTAAGCCACTGTG | |
| | | | | | CACCTG | TTTTGG | |
| WI-7351 | D1154433 | Gene | GDB: 679143 | 0.324 | 307: CCTCCTACACCTGC | 308: TGGAAGAACCCCAG | Folate |
| | | | | | AAAAGC | AGGAC | receptor 3 |
| | | | | | | | (FBP3) |
| WI-14325 | | EST | GDB: 4578507 | 0.132 | 309: AAAGCACAAAAGTA | 310: GTGTGTGGGCCACA | |
| | | | | | ACAGCAACA | ATATTG | |
| WI-15192 | | EST | GDB: 4575806 | 0.15 | 311: AGAGCACCTTTCCT | 312: AGAATCTCATCACA | |
| | | | | | CAGCAC | GGGGCG | |
| WI-17872 | | EST | GDB: 4577492 | 0.141 | 313: AAAAAGGACAGTGT | 314: AATTGTTTTTGTTT | |
| | | | | | CTAAAATTTGA | GTTTTTTGAGT | |
| SHGC-30732 | | EST | GDB: 4567830 | 0.105 | 315: GATTTAGGGAGTAC | 316: GGGGACAAATTATA | |
| | | | | | AAGTGCGG | CTTTATTCAGG | |
| stSG4288 | | EST | GDB: 4566057 | 0.123 | 317: CCATCATCATATTG | 318: TGGCGCCCAAGAAG | |
| | | | | | GTGTGACC | AAG | |
| WI-13814 | | EST | GDB: 4579290 | 0.15 | 319: TTAAGATGCCATTA | 320: CCAAGGAGATGACC | (DRES9 |
| | | | | | AACTCATGA | AAGTGG | |
| WI-14122 | | Gene | GDB: 4576114 | 0.126 | 321: CCATCTCTTTTATC | 322: CTCTGTGCAAGTAA | Human VEGF |
| | | | | | AGGGTTGG | GCATCTTACA | related |
| | | | | | | | factor iso- |
| | | | | | | | form VRF186 |
| | | | | | | | precursor |
| | | | | | | | (VRF) |
| 2729/2730 | D1154057 | EST | GDB: 596509 | 0.118 | 323: CGACTGTGTATTTT | 324: AGAAGCCCATATCA | |
| | | | | | CCACAG | ATGCAC | |
| SHGC-31329 | | EST | GDB: 4567386 | 0.15 | 325: AGCTTAAAGTAGGA | 326: GGATGCTTCACTCC | |
| | | | | | CAACCATGG | AGAAG | |
| SGC33858 | | EST | GDB: 4578600 | 0.27 | 327: TGTTGTTTATTTCC | 328: AGAGTGGCTGCAGG | |
| | | | | | ACCTGCC | CCAG | |
| WI-12191 | | EST | GDB: 1222208 | 0.15 | 329: TTTTTTTTTTTACA | 330: TGAGGAAGTAAAAA | |
| | | | | | CGAATTTGAGG | CAGGTCATC | |
| WI-13701 | | EST | GDB: 4574892 | 0.15 | 331: ATGAAATCTTAAGC | 332: CACAGAGTCCCAGG | |
| | | | | | AGAATCCCA | GTCTGT | |
| WI-14069 | | EST | GDB: 4584373 | 0.15 | 333: AAAGGCCTTTATTT | 334: GCCTCAGAGCTGGT | |
| | | | | | ATCTCTCTCTG | GGGT | |
| WI-14272 | | EST | GDB: 4578525 | 0.125 | 335: GCTTCTAAGTCTTA | 336: AGCCCACAGTCAGC | |
| | | | | | GAGTCTAGAGTCAGCTGG | CTACC | |
| WI-17347 | | EST | GDB: 4578523 | 0.127 | 337: TTGGTTAAATGATG | 338: TGGTCCCACTCACA | |
| | | | | | CCCAGA | TCCC | |
| stSG1561 | | EST | GDB: 4564415 | 0.215 | 339: ACACAGCATGCAGG | 340: ATCCCTGGTGCTTA | |
| | | | | | GAGAG | GGTGG | |
| stSG1938 | | EST | GDB: 4564568 | 0.137 | 341: GATGGAAGTAGCTC | 342: GGAAGGCCAGCAAG | |
| | | | | | CTCTCGG | TACTACC | |
| stSG2759 | | EST | GDB: 4565137 | 0.141 | 343: CCGGTGCTTGGAAA | 344: GAAGTGTCTCTGTT | |
| | | | | | GATG | GGGGGA | |
| RH97 | | EST | GDB: 4559690 | 0.17 | 345: TTACAGGCATGAGT | 346: ACCACTCTCACAGC | |
| | | | | | CACTACGC | CCTTACA | |
| stSG4794 | | EST | GDB: 4573113 | 0.141 | 347: CCCTCCCTCCACAC | 348: GCTCACTGAACTTT | |
| | | | | | ACAC | CAGGGC | |
| stSG4957 | | EST | GDB: 4569051 | 0.171 | 349: AGATACGGGCAAAA | 350: GTTGAATATAGAGC | |
| | | | | | CACTGG | AGGGCCC | |
| stSG4974 | | EST | GDB: 4569063 | 0.166 | 351: TTCTGAGGTCAGGG | 352: AGCTTGAAAATCTC | |
| | | | | | CTGTCT | GTGTCA | |
| stSG8144 | | EST | GDB: 4573137 | 0.17 | 353: ACTCAGTCCCTCCC | 354: TCCTCTCACTCCTT | |
| | | | | | ACCC | CCCAGA | |
| stSG9275 | | EST | GDB: 4569999 | 0.19 | 355: GTGATCACGGCTCA | 356: TGGAGGACTGCTTG | |
| | | | | | ACCTG | AGCC | |
| SHGC-10667 | D1154583 | Gene | GDB: 740246 | 0.277 | 357: CTGCAGCTGCCTCA | 358: TCAAAAGTGCTGGT | Human protein |
| | | | | | GTTTC | GACAGC | kinase(MLK-3) |
| SHGC-11930 | | Gene | GDB: 1231223 | 0.21 | 359: ATTTCCAGAGCCAG | 360: CTTTAATGTTGTGA | FGF3 |
| | | | | | CTCAAA | TGACACAAAGC | |
| SHGC-32786 | | EST | GDB: 4567878 | 0.125 | 361: GATCATGCACTGTT | 362: TACATTTGAAACAT | |
| | | | | | GACCAC | TAAAACCTGA | |
| FKBP2 | | Gene | | 0.064 | 363: AACTGAGCTGTAAC | 364: TGGAACAGTCTGGT | FK506-Binding |
| | | | | | CAGACTGGGA | CCTGATGG | Protein |
| | | | | | | | Precursor |
| | | | | | | | (FKBP-13) |
| WI-13116 | | EST | GDB: 4585099 | 0.202 | 365: TTATCCCTTTATTG | 366: TGGTCACCTGTATT | |
| | | | | | TTTCTCCTTTG | TATTGCTAGG | |
| MDU1 | | Gene | GDB: 4590064 | 0.859 | 367: TCTTCAAAGCCTCT | 368: CTCATCTCCAACCT | 4F2 Cell- |
| | | | | | GCAGTACC | GTCTAACC | Surface |
| | | | | | | | Antigen Heavy |
| | | | | | | | Chain (4F2HC) |
| S453 | D115579 | STS | GDB: 196276 | 0.108 | 369: GTGGCTGCAGCTAA | 370: CAGCAGAGACAATG | |
| | | | | | TGTAAGACAC | GCGTAAGTCC | |
| STS1-cSRL- | D1153866 | STS | GDB: 547681 | 0.135 | 371: CTGATTGAGAACCA | 372: TAAAGCCCTATAAC | |
| 112e11 | | | | | GAACAG | CTCTCC | |
| STS1-cSRL- | D1153830 | STS | GDB: 547609 | 0.118 | 373: TAGTAAGGGACCTT | 374: AGATGTTTGGTATG | |
| 44a3 | | | | | CACCAG | ACTTGG | |
| STS1-cSRL- | D1152439 | STS | GDB: 459728 | 0.123 | 375: GATGATTAAACTCT | 376: GAGACAGCTAAGCA | |
| 31b12 | | | | | CCTGGC | CTCATG | |
| cSRL-419 | D1151137 | STS | GDB: 197824 | 0.196 | 377: GAGGTGGTGGGCAC | 378: AGAGGGGAGGAACA | Folate |
| | | | | | CTGTA | CACCTT | receptor 2 |
| | | | | | | | (FBP2) |
| SHGC-10323 | D1154351 | Gene | GDB: 676135 | 0.141 | 379: GACCAGAGTCTGCC | 380: TCCCCAGCTCTATC | Collagen |
| | | | | | CAGAAG | CCAAC | binding |
| | | | | | | | protein 2, |
| | | | | | | | colligin-2 |
| | | | | | | | gene (CBP2) |
| WI-9219 | | Gene | GDB: 678179 | 0.1 | 381: GGAGGGATGGACAA | 382: GTCCAGCTCGCTGA | Retinal outer |
| | | | | | GTCTGA | CTATCC | segment |
| | | | | | | | membrane |
| | | | | | | | protein 1, |
| | | | | | | | ROM1 |
| GTC_ZNF | | Gene | | 0.172 | 383: TCAAAACACAGTCA | 384: GCAAAGGCTTTACC | ZNF126 |
| | | | | | TCTCCA | ATATTG | |
| AFMa152yh1 | D1154087 | MSAT | GDB: 603797 | 0.158 | 385: GCTCAGCACCCCCA | 386: TCCCTGCTCGGGAA | |
| | | | | | TT | AC | |
| AFMb331zh5 | D1154162 | MSAT | GDB: 611241 | 0.263 | 387: GTTCTCCAGAGAGA | 388: GAGAGCAACACTAT | |
| | | | | | CAGCAC | TGCCC | |
| AFMb038yb9 | D1154139 | MSAT | GDB: 609621 | 0.151 | 389: TATAGACTTCAGCC | 390: CCTCTGTAGGATGC | |
| | | | | | CTGCTGC | AGTTGG | |
| AFM212xe3 | D1151314 | MSAT | GDB: 199292 | 0.209 | 391: TTGCTACGCACTCC | 392: GTGAAGGCAGGAAA | |
| | | | | | TCTACT | TGTGAC | |
| WI-18813 | | EST | | 0.13 | 393: ATCCTAGACCAGAG | 394: CTCCCCCTGGTCCA | Serine/ |
| | | | | | GAGCCC | GTTATT | threonine |
| | | | | | | | kinase |
| WI-19549 | | EST | | 0.252 | 395: AACTTTCATTTGCC | 396: AGCAGATCTGCTCT | |
| | | | | | AAGGGA | TGCGAT | |
| WI-20154 | | EST | | 0.25 | 397: bACAGTTGTCATCG | 398: AAAAGTATGAATGG | |
| | | | | | GTAGGCA | GATGGAGC | |
| WI-22393 | | EST | GDB: 4583084 | 0.142 | 399: GTGCAGGTGGCGTT | 400: CCCTATATCTCCGT | DRES9 |
| | | | | | TATTTT | GTGCTCC | |
| WI-7587 | | EST | GDB: 1223732 | 0.274 | 401: GCTCTAGTGGGAAA | 402: GAATTCCAGGCTCT | Ultra high- |
| | | | | | CCTCAGG | TGCTTG | sulphur |
| | | | | | | | keratin |
| | | | | | | | protein |
| | | | | | | | (KRN1) |
| EST455579 | | EST | | 0.273 | 403: GGTTTGGTCTCAAA | 404: CCAGTACATGGTGG | |
| | | | | | GGCAAA | TCACCA | |
| WI-21134 | | EST | | 0.293 | 405: GCTGCCTTGGAATT | 406: GTGCTGTGGTGGGG | Fas- |
| | | | | | TCTGTT | AAAG | associating |
| | | | | | | | death |
| | | | | | | | domain- |
| | | | | | | | containing |
| | | | | | | | protein, FADD |
| WI-21698 | | EST | GDB: 740192 | 0.25 | 407: ATTCAAGCTCATCC | 408: GGACTGGCCCTTTG | |
| | | | | | AGACCC | AAACTC | |
| SHGC-7373 | D1154567 | STS | | 0.225 | 409: ATATTGACCGTGCA | 410: AGACCTGGGAAAAG | |
| | | | | | CAAATACG | TGGAGAA | |
| SHGC-36533 | | STS | | 0.125 | 411: ATTGGCAGTGGAAA | 412: TTAATCTTTTGTCA | |
| | | | | | ATGCTT | ACTTCCTGATT | |
| ARIX | | Gene | GDB: 6262613 | 0.242 | 413: tctgtcctcctttc | 414: ggataaagaaactc | Arix homeo- |
| | | | | | accggaagc | cgctctgctggtaga | domain |
| | | | | | | | protein, |
| | | | | | | | neuro- |
| | | | | | | | endocrine |
| | | | | | | | specific, tx |
| | | | | | | | factor |
| CLCLPCR | | Gene | | | 415: TCAGGGCCTGTGTT | 416: AGCGATGTAAAGGG | Chloride |
| | | | | | GCCGCACTCTG | TACCAGTGCCGAGG | channel |
| | | | | | | | current |
| | | | | | | | inducer, |
| | | | | | | | ICLN gene |
| B188N21-HL | | STS | | | 417: AGGCATGCAAGCTT | 418: CCGGGAGGAGACAT | |
| | | | | | CTTA | CTAT | |
| B234C17-HR | | STS | | | 419: TGGTAAGCACAGAA | 420: AATGGATGGGGGAT | |
| | | | | | AATGC | TATT | |
| B235G10-HR | | STS | | | 421: CTGGACGTTATGTC | 422: AGAGGCCCAGTCAC | |
| | | | | | TGCC | AGAT | |
| B247F23-HR | | STS | | | 423: ATCACTCTGAACTG | 424: CCCTTCTGTTTTTC | |
| | | | | | CCACT | TGTTTT | |
| B337H24-HL | | STS | | | 425: CAAGCTTTGAAGGA | 426: TAGGACGTTAAGTG | |
| | | | | | AGAG | AGGAC | |
| B337L5-HL | | STS | | | 427: GCTCTGCAGTGGGT | 428: ACTCTCCAAGACTG | |
| | | | | | AAAA | TGCG | |
| B382N10-HR | | STS | | | 429: CCCTTTCTGAGGCA | 430: GACCACCTGGGAGA | |
| | | | | | AGAT | GAAC | |
| B1211-HR | | STS | | | 431: CGCTATGAGTCCCA | 432: GATCAGCTGCAATG | |
| | | | | | TCTG | AAGG | |
| B180D17-HR | | STS | | | 433: TTGAGTACACGGGG | 434: CGCAGGACTGAAAG | |
| | | | | | TGAC | ATGA | |
| B236E6-HR | | STS | | | 435: ACCTGTCTCCTCTC | 436: TGCTTTTCTTCTGT | |
| | | | | | CTGG | GGGA | |
| B278E22-HR | | STS | | | 437: ATGACCAGCAAGCA | 438: GTACTGGGATTACA | |
| | | | | | TTGT | GGCG | |
| B313F21-HR | | STS | | | 439: GCAGAAGGTCCTTT | 440: TTTGCAGGATTCAT | |
| | | | | | GGAT | GCTT | |
| B337H24-HR | | STS | | | 441: CGACATTCTTTTCT | 442: ACCTTTGCATGTTG | |
| | | | | | GGAGG | GTTTT | |
| B358H9-HR | | STS | | | 443: GCACTTTTCCTTCC | 444: TGCTTGCTTTCTTC | |
| | | | | | TTCC | TGG | |
| B148N18-HL | | STS | | | 445: ACAGCTCCAGAGAG | 446: GCAGTCACTTGAAA | |
| | | | | | AAGGA | CCAGA | |
| B172N12-HL | | STS | | | 447: AGGCATCAAGCTTT | 448: GGTTTAGAGAACCG | |
| | | | | | CCTT | AGCC | |
| B172N12-HR | | STS | | | 449: GTGGTGCTGCAAGT | 450: GGAATCCCTTTCTT | |
| | | | | | TACC | TCCA | |
| B215J11-HR | | STS | | | 451: GACCATTTCTTACG | 452: GATGGGTGTGAATG | |
| | | | | | CAGC | AACAA | |
| B223E5-HR | | STS | | | 453: CTCAAGCTTCTGTT | 454: GCTGTGAGTGTCTT | |
| | | | | | CATGC | GGCT | |
| B312B3-HR | | STS | | | 455: TACAGAAAACCGCA | 456: GCCACCAAAGGAAA | |
| | | | | | GCTC | GATT | |
| B328G19-HL | | STS | | | 457: AAAAGGAGGGAATC | 458: TCACTTAGCAGGAG | |
| | | | | | ATGG | GCAG | |
| B328G19-HR | | STS | | | 459: CTGAGCATCCGATG | 460: GTGCAAAATGAGCA | |
| | | | | | AGAC | GCTT | |
| B329I10-HL | | STS | | | 461: TCTAACCCCTTACT | 462: TCCTCAACTGGGAA | |
| | | | | | GGGC | TGA | |
| B320I10-HR | | STS | | | 463: TTACACAGGACCAG | 464: ATCTCCCCCACTCA | |
| | | | | | GGA | GAAG | |
| B368G19-HL | | STS | | | 465: GTCCACGGGCTTTA | 466: TGAGCATAAATTTC | |
| | | | | | TTCT | ATTAGCTG | |
| B368G19-HR | | STS | | | 467: GGAAGAGCAAAATA | 468: GGTGCACAGAATTG | |
| | | | | | AATCCA | TTCAT | |
| B36F16-HL | | STS | | | 469: AGCACGCTTATTTC | 470: GTAACACCAGCAGG | |
| | | | | | ATGG | GACA | |
| B250K11-HR | | STS | | | 471: TCCTGCTGCATTAT | 472: GGGGGTGAGAAGTA | |
| | | | | | GGAT | GGAA | |
| B338D17-HR | | STS | | | 473: ATGGGGATTAAATA | 474: AGCTAGCATTGGGC | |
| | | | | | CGGG | TCTT | |
| B268I23-HL | | STS | | | 475: CTGAGGAGAAGAGG | 476: CGCCTTACAAGGCA | |
| | | | | | CTGG | AGTA | |
| B286I23-HR | | STS | | | 477: AGGATGCTTGCTAG | 478: CACAAGTGTCTGGA | |
| | | | | | GGTT | AGGC | |
| B371E15-HR | | STS | | | 479: GGTCTCAGGAGCCC | 480: ACATGCCACTCTTC | |
| | | | | | TTTA | TCACTAA | |
| B312F21-HL | | STS | | | 481: ACTTAACCAAGGAT | 482: CAACCCACGAGCAT | |
| | | | | | GGGG | AAGA | |
| B338D17-HL | | STS | | | 483: TAGGCTCTGCACTC | 484: ACCCACGGAGTCTC | |
| | | | | | TTGG | TCTC | |
| B369H19-HL | | STS | | | 485: TAAAGGCGGTGAAG | 486: CTACCGCTCTCCTA | |
| | | | | | TGAG | GGCT | |
| B369H19-HR | | STS | | | 487: TGGGGCCAGATAAT | 488: CTGGTGTTTGGTGG | |
| | | | | | CTT | TGTT | |
| B444N11-HR | | STS | | | 489: AAGGAAGAGGTCAC | 490: CACAAATTCCATTT | |
| | | | | | CAGG | CCCA | |
| B269L23-HL | | STS | | | 491: TCAATAGGTGATCC | 492: AAAGTCCCACAAAG | |
| | | | | | AACATTT | GGTC | |
| B250K11-HL | | STS | | | 493: GGGTAGGGGGATCT | 494: TGTGGAACATTCAT | |
| | | | | | TTTT | TGGC | |
| B269L23-HR | | STS | | | 495: GTCCTGGGAAAGAT | 496: TCAAAGCGTCTCCC | |
| | | | | | GGAA | ATAA | |
| B364H4-HL | | STS | | | 497: TCTTTCGCTGTACT | 498: TGGGAGGTCAGAGT | |
| | | | | | TGGC | GATG | |
| B364H4-HR | | STS | | | 499: GGACAGTGTATGTG | 500: AGGCAGCTGTTTTT | |
| | | | | | TTGGG | GTGA | |
| B473O3-HR | | STS | | | 501: CTTCTTGAGTCCCG | 502: CAACCGAGAATCCT | |
| | | | | | TGTG | CTAGC | |
| B180D17-HL | | STS | | | 503: GCTGGGAGAGAATC | 504: GCTTTGCAGAAGAG | |
| | | | | | ACAA | ACCA | |
| B200E21-HL | | STS | | | 505: ACGCTGTCAGGTCA | 506: GGAGGATGCTCAGG | |
| | | | | | CACT | TGAT | |
| B200E21-HR | | STS | | | 507: TAGGGGGATCTTTT | 508: GAGCAATTTGAAAA | |
| | | | | | TCCA | GCCA | |
| B14L15-HR | | STS | | | 509: ATGGTCCAGCTCCT | 510: ATAGAGCACCCCAT | |
| | | | | | CTGT | CTCC | |
| B442P6-HR | | STS | | | 511: AACATTGCTGTTAG | 512: GCAATCGAAACAGC | |
| | | | | | CCCA | ATTC | |
| B188N21-HR | | STS | | | 513: ATGAGTTGGCAGCT | 514: AATGAAGGTCTTGC | |
| | | | | | GAAG | CTCC | |
| GTC-ARRB1 | | Gene | | 0.067 | 515: GAGGAGAAGATCCA | 516: TCTCTGGGGCATAC | Beta- |
| | | | | | CAAGCG | TGAACC | arrestin-1 |
| B508A5-HL | | STS | | | 517: CTGAGCTTTTGGCA | 518: CTGCTAGGTGACAG | |
| | | | | | CTGT | CAGG | |
| B36F16-HR | | STS | | | 519: TGTATGAGTCTGGA | 520: ACACCTGGCTGAGG | |
| | | | | | GGGTGT | AAAT | |
| B117N18-HL | | STS | | | 521: GCAGGGGACGTGAT | 522: TTTTGCTTCCTACC | |
| | | | | | AATA | ATGC | |
| B14L15-HL | | STS | | | 523: AAAATTGTGAGCAC | 524: TTTATATTTAAAGT | |
| | | | | | CTCC | GGCTTTGTT | |
| B21K22-HL | | STS | | | 525: GTGCAAAGCCCACA | 526: AGGAAAATGCAAGA | |
| | | | | | GTAT | GCAG | |
| B21K22-HR | | STS | | | 527: CCACTGAATTGCAT | 528: TCTGGGTCCAGTCT | |
| | | | | | ACTTTG | GCTA | |
| B223E5-HL | | STS | | | 529: AGATTTTGGGGAGT | 530: GCGCTCAAGCAATT | |
| | | | | | CAGG | CTC | |
| B278E22-HL | | STS | | | 531: CAGCCCCAAAGTAG | 532: GAATCATCCAATCC | |
| | | | | | TCA | ACGA | |
| B444M11-HL | | STS | | | 533: AGCCTCCAGGTGAC | 534: GAAGGACATGGTCA | |
| | | | | | TACC | GCAG | |
| B543O19-HR | | STS | | | 535: ATGCTTTCAGCATT | 536: TGATCCGTGGTAGG | |
| | | | | | TTCG | GTTA | |
| B117N18-HR | | STS | | | 537: GTCGGATTGGTTTC | 538: TTTATGGGAATTTC | |
| | | | | | ACAA | AGCC | |
| B543O19-HL | | STS | | | 539: TTTGGAAAAGAACA | 540: GGCTAGTCTTTCCT | |
| | | | | | GAAATGT | GAACC | |
| B442P6-HL | | STS | | | 541: CCTTAATGCCCCTG | 542: GCGTTTACAAGCTG | |
| | | | | | ATTC | AGGA | |
| B367H4-HR | | STS | | | 543: TCAAGCTTGCTTTC | 544: GTAGCCCAGCAAGT | |
| | | | | | TCAA | GTCT | |
| B250E21-HR | | STS | | | 545: CCTGGCTGGAGATA | 546: CTTCCCCTCTGCCT | |
| | | | | | GGAT | ATGT | |
| B250E21-HL | | STS | | | 547: GGCACGTACTTCCT | 548: GGTGCTTCTTACAG | |
| | | | | | ACCA | GCAA | |
| B248C16-HR | | STS | | | 549: ACCCAGGCTGGTGT | 550: ACTGAGTTAATTAT | |
| | | | | | GT | CACTCCCCT | |
| B248C16-HL | | STS | | | 551: GATGCATTTTGCTT | 552: TCTGTTTTAGAGCT | |
| | | | | | CACC | GTTAGC | |
| B160D8-HR | | STS | | | 553: TCAAGCTTCAAAGA | 554: GGAGTACATCCCAG | |
| | | | | | GCAGA | GACC | |
| B539L7-HR | | STS | | | 555: TGGTGCTTTTAAAT | 556: CTCCCTTACTTACT | |
| | | | | | CCAGA | TGCATTG | |
| B473O3-HL | | STS | | | 557: TCTTCTCCCAGGGA | 558: TTTATGTCCCCTGA | |
| | | | | | ATCT | GCAC | |
| AFMa190xd9 | D1154095 | STS | GDB: 606064 | 0.193 | 559: TCCCTGGCTATCTT | 560: CTTGACTGGGTCCA | |
| | | | | | GAATC | CG | |
| ARRB1(2) | | STS | | | 561: CGAGACGCCAGTAG | 562: CATCCTCCATGCCT | |
| | | | | | ATACCA | TTCAGT | |
| ARRB1(1) | | STS | | | 563: AGTTCCAGAGAACG | 564: CTTGTCATCCTCCA | |
| | | | | | AGACGC | TGCCTT | |
| P102F3S | | STS | GDB: 6054145 | | 565: GAGCGTGAGAGGTT | 566: AAACAAACTCCAGA | |
| | | | | | GAGGAG | CGCACC | |
| N172A | | STS | GDB: 6054146 | 0.208 | 567: CTGAACCACTACCT | 568: CTAACTACTTACTC | |
| | | | | | GTATGACCT | CTACAGGGCCC | |
| N60A | | STS | GDB: 6054147 | 0.23 | 569: GAAGCATTTCAATA | 570: CCACTCCAGTGCAC | |
| | | | | | CTTTAACTG | CCAATC | |
| cCI11-AA4 | | STS | GDB: 6054148 | 0.239 | 571: CTTCTCCTGGCCAC | 572: GGTTTACCTTTGAA | |
| | | | | | TCTGAC | TCCCAGC | |
| CN1677-2A | | STS | GDB: 6054149 | 0.271 | 573: TGAGGATGAATGAG | 574: TTTGTGGTCCATTG | |
| | | | | | CACATAGG | AGTAGGC | |
| cCI11-524B | | STS | GDB: 6054150 | 0.221 | 575: AGGGGAAGGAATGT | 576: TTCGGCTGAGCGGG | |
| | | | | | GCTTGG | CAGTGT | |
| P117F3T | | STS | GDB: 6054151 | 0.168 | 577: ATTGAAGGTCCTCC | 578: AGAACGTCAACATA | |
| | | | | | AAAAGAATGCTGCAGC | TCTTTTTGGGGGACAC | |
| ARRB1(3) | | Gene | | | 579: TTGTATTTGAGGAC | 580: CGGTACCATCCTCC | |
| | | | | | TTTGCTCG | TCTTCC | |
| B215J11-HL | | STS | | 0.122 | 581: TTTTTGCCTCATCT | 582: GGGTGACAGAGCAA | |
| | | | | | ATGCCC | GACTCC | |
| B317G1-HR | | STS | | | 583: TTGCTCAAGTTCTC | 584: ACCTTGTTTTGAGG | |
| | | | | | CTGG | GGAG | |
| B317G1-HL | | STS | | | 585: CTTGGCTATTTGGA | 586: GGGCATTTACTCAC | |
| | | | | | CAGC | TTGC | |
| B292J118-HR | | STS | | | 587: CTTGTGTCAGTTGT | 588: TGGAATTGTTGTGT | |
| | | | | | CAGGG | CTTGG | |
| B10A18-HL | | STS | | | 589: CCAGTTCCACTGGA | 590: ATGGGCTGTGTTTC | |
| | | | | | TGTT | TCAA | |
| B10A18-HR | | STS | | | 591: CTGCCTATCCCTGG | 592: ACTTTGTCCCTAGT | |
| | | | | | ACTT | GCCC | |
| B527D12-HL | | STS | | | 593: CAACACGTCTGACA | 594: GGATAGTGCACACC | |
| | | | | | TCCAT | CA | |
| B372J11-HR | | STS | | | 595: TGGGTGGTACTATT | 596: AGTTCCAGCCCCCT | |
| | | | | | GTTCCCAT | TACCAG | |
| B372J11-HL | | STS | | | 597: GGCCACTATCATCC | 598: TTTCACATGGGAAG | |
| | | | | | CTGTGT | AACACG | |
| B37E17-HR(GS) | | STS | | | 599: ACAGTGACACTAGG | 600: TGCCAGGATGGAGA | |
| | | | | | GACGGG | TAACAA | |
| B37E17-HL(GS) | | STS | | | 601: CCTGTGGCACACAT | 602: ACAACCAAGAATGG | |
| | | | | | ATCACC | AGCCAC | |
| B34F22-HR(GS) | | STS | | | 603: TGCTGTGTAACAAG | 604: TGAACGGAGGACCT | |
| | | | | | TCCCCA | ACCAAG | |
| B34F22-HL(GS) | | STS | | | 605: GCAGGGTCCGACTC | 606: GCTGTGAGTTCCCT | |
| | | | | | ACTAAG | TTACGC | |
| B648P22-HR1 | | STS | | | 607: ACAGTGGGGACAAG | 608: TACAGGGCACCTCC | |
| | | | | | ACAGG | CAGTAG | |
| B8ZA4-HR2 | | STS | | | 609: TCTTCTGTTAAGGT | 610: TGTCTCAAACTCCC | |
| | | | | | TTCCCCC | TCTGC | |
| B648P22-HL | | STS | | | 611: AACATATTTCCTCC | 612: CAGTCCCAGCCAAT | |
| | | | | | CCAGCC | GAGAAC | |
| B82L11-HL(GS) | | STS | | | 613: CTCCTCTGCATGGG | 614: AGACCTGGGACCAG | |
| | | | | | AGAATC | TCTGTG | |
| B86J13-HL(GS) | | STS | | | 615: GGGAGACGACGTCA | 616: TGATGTTGGGAAGA | |
| | | | | | CAAGAT | TGGTGA | |
| I44AZ4-HL | | STS | | | 617: CAGGCATCTTCTAT | 618: GGGAGGCACAAGTT | |
| | | | | | GTGCCA | CTTTCA | |
| B82L11-HR(GS) | | STS | | | 619: ACTTCGTGGCACTG | 620: CCTTTCTTACGGAT | |
| | | | | | AGTGTG | GAGGCA | |
| B86J13-HR(GS) | | STS | | | 621: GGCTGCTGAGCTCT | 622: TGGGTCTCTCTGCC | |
| | | | | | TCTGAT | TGACTT | |
| B82L11-HL2(GS) | | STS | | | 623: TCACCTACTTCCAG | 624: AGACCTGGGACCAG | |
| | | | | | CTTCCG | TCTGTG | |
| B82L11-HL3(GS) | | STS | | | 625: CTCCTCTGCATGGG | 626: AATTCAGGAGACCT | |
| | | | | | AGAATC | GGGACC | |

[0234] Novel STSs were developed either from publicly available genomic sequence or from sequence-derived BAC insert ends. Primers were chosen using a script which automatically performs vector and repetitive sequence masking using Cross_match (P. Green, Univ. of Washington) and subsequent primer picking using Primer3 (Rozen, Skaletsky (1996, 1997). Primer3 is available at: www.genome.wi.mit.edu/genome_software/other/primer3.html.

[0235] Polymerase chain reaction (PCR) conditions for each primer pair were initially optimized with respect to MgCl₂ concentration. The standard buffer was 10 mM Tris-HCl (pH 8.3), 50 mM KCl, MgCl₂, 0.2 mM each dNTP, 0.2 μM each primer, 2.7 ng/μl human DNA, 0.25 units of AmpliTaq (Perkin Elmer) and MgCl₂ concentrations of 1.0 mM, 1.5 mM, 2.0 mM or 2.4 mM. Cycling conditions included an initial denaturation at 94° C. for 2 minutes followed by 40 cycles at 94° C. for 15 seconds, 55° C. for 25 seconds, and 72° C. for 25 seconds followed by a final extension at 72° C. for 3 minutes. Depending on the results from the initial round of optimization the conditions were further optimized if necessary. Variables included increasing the annealing temperature to 58° C. or 60° C., increasing the cycle number to 42 and the annealing and extension times to 30 seconds, and using AmpliTaq™ Gold (Perkin Elmer).

[0236] BAC clones (Kim et al., 1996 Genomics 32: 213-8; and Shizuya et al., 1992 Proc. Natl. Acad. Sci. USA 89: 8794-7) containing STS markers of interest were obtained by PCR-based screening of DNA pools from a total human BAC library purchased from Research Genetics. DNA pools derived from library plates 1-596 were used corresponding to nine genomic equivalents of human DNA. The initial screening process involved PCR reactions of individual markers against superpools, i.e., a mixture of DNA derived from all BAC clones from eight 384-well library plates. For each positive superpool, plate (8), row (16) and column (24), pools were screened to identify a unique library address. PCR products were electrophoresed in 2% agarose gels (Sigma) containing 0.5 μg/ml ethidium bromide in 1×TBE at 150 volts for 45 min. The electrophoresis units used were the Model A3-1 systems from Owl Scientific Products. Typically, gels contained 10 tiers of lanes with 50 wells/tier. Molecular weight markers (100 bp ladder, Life Technologies, Bethesda, Md.) were loaded at both ends of the gel. Images of the gels were captured with a Kodak DC40 CCD camera and processed with Kodak 1D software. The gel data were exported as tab delimited text files; names of the files included information about the library screened, the gel image files and the marker screened. These data were automatically imported using a customized Perl script into Filemaker™ PRO (Claris Corp.) databases for data storage and analysis. In cases where incomplete or ambiguous clone address information was obtained, additional experiments were performed to recover a unique, complete library address.

[0237] Recovery of clonal BAC cultures from the library involved streaking out a sample from the library well onto LB agar (Maniatis et al., Molecular Cloning: A Laboratory Manual, Cold Spring Harbor Laboratory, Cold Spring Harbor, N.Y. (1982)) containing 12.5 μg/ml chloramphenicol (Sigma). Two individual colonies and a portion of the initial streak quadrant were tested with appropriate STS markers by colony PCR for verification. Positive clones were stored in LB broth containing 12.5 μg/ml chloramphenicol and 15% glycerol at −70° C.

[0238] Several different types of DNA preparation methods were used for isolation of BAC DNA. The manual alkaline lysis miniprep protocol listed below (Maniatis et al., 1982) was successfully used for most applications, i.e., restriction mapping, CHEF gel analysis, FISH mapping, but was not successfully reproducible by endsequencing. The Autogen and Qiagen protocols were used specifically for BAC DNA preparation for endsequencing purposes.

[0239] Bacteria were grown in 15 ml Terrific Broth containing 12.5 μg/ml chloramphenicol in a 50 ml conical tube at 37° C. for 20 hrs with shaking at 300 rpm. The cultures were centrifuged in a Sorvall RT 6000 D at 3000 rpm (˜1800×g) at 4° C. for 15 min. The supernatant was then aspirated as completely as possible. In some cases, cell pellets were frozen at −20° C. at this step for up to 2 weeks. The pellet was then vortexed to homogenize the cells and minimize clumping. 250 μl of P1 solution (50 mM glucose, 15 mM Tris-HCl, pH 8, 10 mM EDTA, and 100 μg/ml RNase A) was added and the mixture pipetted up and down to mix. The mixture was then transferred to a 2 ml Eppendorf tube. 350 μl of P2 solution (0.2 N NaOH, 1% SDS) was then added, the mixture mixed gently and incubated for 5 min at room temperature. 350 μl of P3 solution (3 M KOAc, pH 5.5) was added and the mixture mixed gently until a white precipitate formed. The solution was incubated on ice for 5 min and then centrifuged at 4° C. in a microfuge for 10 min. The supernatant was transferred carefully (avoiding the white precipitate) to a fresh 2 ml Eppendorf tube, and 0.9 ml of isopropanol was added, the solution mixed and left on ice for 5 min. The samples were centrifuged for 10 min, and the supernatant removed carefully. Pellets were washed in 70% ethanol and air dried for 5 min. Pellets were resuspended in 200 μl of TE8 (10 mM Tris-HCl, pH 8.0, 1.0 mM EDTA), and RNase A (Boehringer Mannheim) added to 100 μg/ml. Samples were incubated at 37° C. for 30 min, then precipitated by addition of C₂H₃O₂Na.₃H₂O to 0.5 M and 2 volumes of ethanol. Samples were centrifuged for 10 min, and the pellets washed with 70% ethanol followed by air drying and dissolving in 50 μl TE8. Typical yields for this DNA prep were 3-5 μg/15 ml bacterial culture. Ten to 15 μl were used for HindIII restriction analysis; 5 μl was used for NotI digestion and clone insert sizing by CHEF gel electrophoresis.

[0240] BACs were inoculated into 15 ml of 2×LB Broth containing 12.5 μg/ml chloramphenicol in a 50 ml conical tube. Four tubes were inoculated for each clone. Cultures were grown overnight (˜16 hr) at 37° C. with vigorous shaking (>300 rpm). Standard conditions for BAC DNA isolation were followed as recommended by the Autogen 740 manufacturer. 3 ml samples of culture were placed into Autogen tubes for a total of 60 ml or 20 tubes per clone. Samples were dissolved finally in 100 μl TE8 with 15 seconds of shaking as part of the Autogen protocol. After the Autogen protocol was finished DNA solutions were transferred from each individual tube and pooled into a 2 ml Eppendorf tube. Tubes with large amounts of debris (carry over from the pelleting debris step) were avoided. The tubes were then rinsed with 0.5 ml of TE8 successively and this solution added to the pooled material. DNA solutions were stored at 4° C.; clumping tended to occur upon freezing at −20° C. This DNA was either used directly for restriction mapping, CHEF gel analysis or FISH mapping or was further purified as described below for use in endsequencing reactions.

[0241] The volume of DNA solutions was adjusted to 2 ml with TE8, samples were then mixed gently and heated at 65° C. for 10 min. The DNA solutions were then centrifuged at 4° C. for 5 min and the supernatants transferred to a 15 ml conical tube. The NaCl concentration was then adjusted to 0.75 M (˜0.3 ml of 5 M NaCl to the 2 ml sample). The total volume was then adjusted to 6 ml with Qiagen column equilibration buffer (Buffer QBT). The supernatant containing the DNA was then applied to the column and allowed to enter by gravity flow. Columns were washed twice with 10 ml of Qiagen Buffer QC. Bound DNA was then eluted with four separate 1 ml aliquots of Buffer QF kept at 65° C. DNA was precipitated with 0.7 volumes of isopropanol (˜2.8 ml). Each sample was then transferred to 4 individual 2.2 ml Eppendorf tubes and incubated at room temperature for 2 hr or overnight. Samples were centrifuged in a microfuge for 10 min. at 4° C. The supernatant was removed carefully and 1 ml of 70% ethanol was added. Samples were centrifuged again and because the DNA pellets were often loose at this stage, the supernatant removed carefully. Samples were centrifuged again to concentrate remaining liquid which was removed with a micropipet tip. DNA pellets were then dried in a desiccator for 10 min. 20 μl of sterile distilled and deionized H₂O was added to each tube which was then placed at 4° C. overnight. The four 20 μl samples for each clone were pooled and the tubes rinsed with another 20 μl of sterile distilled and deionized H₂O for a final volume of 100 μl. Samples were then heated at 65° C. for 5 min. and then mixed gently. Typical yields were 2-5 μg/60 ml culture as assessed by NotI digestion and comparison with uncut lambda DNA.

[0242] 3 ml of LB Broth containing 12.5 μg/ml of chloramphenicol was dispensed into autoclaved Autogen tubes. A single tube was used for each clone. For inoculation, glycerol stocks were removed from −70° C. storage and placed on dry ice. A small portion of the glycerol stock was removed from the original tube with a sterile toothpick and transferred into the Autogen tube; the toothpick was left in the Autogen tube for at least two minutes before discarding. After inoculation the tubes were covered with tape making sure the seal was tight. When all samples were inoculated, the tube units were transferred into an Autogen rack holder and placed into a rotary shaker at 37° C. for 16-17 hours at 250 rpm. Following growth, standard conditions for BAC DNA preparation, as defined by the manufacturer, were used to program the Autogen. Samples were not dissolved in TE8 as part of the program and DNA pellets were left dry. When the program was complete, the tubes were removed from the output tray and 30 μl of sterile distilled and deionized H₂O was added directly to the bottom of the tube. The tubes were then gently shaken for 2-5 seconds and then covered with parafilm and incubated at room temperature for 1-3 hours. DNA samples were then transferred to an Eppendorf tube and used either directly for sequencing or stored at 4° C. for later use.

[0243] 7. BAC Clone Characterization for Physical Mapping

[0244] DNA samples prepared either by manual alkaline lysis or the Autogen protocol were digested with HindIII for analysis of restriction fragment sizes. This data were used to compare the extent of overlap among clones. Typically 1-2 μg were used for each reaction. Reaction mixtures included: 1× Buffer 2 (New England Biolabs), 0.1 mg/ml bovine serum albumin (New England Biolabs), 50 μg/ml RNase A (Boehringer Mannheim), and 20 units of HindIII (New England Biolabs) in a final volume of 25 μl. Digestions were incubated at 37° C. for 4-6 hours. BAC DNA was also digested with NotI for estimation of insert size by CHEF gel analysis (see below). Reaction conditions were identical to those for HindIII except that 20 units of NotI were used. Six μl of 6× Ficoll loading buffer containing bromphenol blue and xylene cyanol was added prior to electrophoresis.

[0245] HindIII digests were analyzed on 0.6% agarose (Seakem, FMC Bioproducts) in 1×TBE containing 0.5 μg/ml ethidium bromide. Gels (20 cm×25 cm) were electrophoresed in a Model A4 electrophoresis unit (Owl Scientific) at 50 volts for 20-24 hrs. Molecular weight size markers included undigested lambda DNA, HindIII digested lambda DNA, and HaeIII digested _X174 DNA. Molecular weight markers were heated at 65° C. for 2 min prior to loading the gel. Images were captured with a Kodak DC40 CCD camera and analyzed with Kodak 1 D software.

[0246] NotI digests were analyzed on a CHEF DRII (BioRad) electrophoresis unit according to the manufacturer's recommendations. Briefly, 1% agarose gels (BioRad pulsed field grade) were prepared in 0.5×TBE, equilibrated for 30 minutes in the electrophoresis unit at 14° C., and electrophoresed at 6 volts/cm for 14 hrs with circulation. Switching times were ramped from 10 sec to 20 sec. Gels were stained after electrophoresis in 0.5 μg/ml ethidium bromide. Molecular weight markers included undigested lambda DNA, HindIII digested lambda DNA, lambda ladder PFG ladder, and low range PFG marker (all from New England Biolabs).

[0247] BAC DNA prepared either by the manual alkaline lysis or Autogen protocols were labeled for FISH analysis using a Bioprime labeling kit (BioRad) according to the manufacturer's recommendation with minor modifications. Approximately 200 ng of DNA was used for each 50 μl reaction. 3 μl were analyzed on a 2% agarose gel to determine the extent of labeling. Reactions were purified using a Sephadex G50 spin column prior to in situ hybridization. Metaphase FISH was preformed as described (Ma et al., 1996 Cytogenet. Cell Genet., 74: 266-71).

[0248] 8. BAC Endsequencing

[0249] The sequencing of BAC insert ends utilized DNA prepared by either of the two methods described above. The DYEnamic energy transfer primers and Dynamic Direct cycle sequencing kits from Amersham were used for sequencing reactions. Ready made sequencing mix including the M13-40 forward sequencing primer was used (Catalog #US79730) for the T7 BAC vector terminus; ready made sequencing mix (Catalog #US79530) was mixed with the M13-28 reverse sequencing primer (Catalog #US79339) for the SP6 BAC vector terminus. The sequencing reaction mixes included one of the four fluorescently labeled dye-primers, one of the four dideoxy termination mixes, dNTPs, reaction buffer, and Thermosequenase. For each BAC DNA sample, 3 μl of the BAC DNA sample was aliquoted to 4 PCR strip tubes. 2 μl of one of the four dye primer/termination mix combinations was then added to each of the four tubes. The tubes were then sealed and centrifuged briefly prior to PCR. Thermocycling conditions involved a 1 minute denaturation at 95° C., 15 second annealing at 45° C., and extension for 1 minute at 70° C. for 35 total cycles. After cycling the plates were centrifuged briefly to collect all the liquid to the bottom of the tubes. 5 μl of sterile distilled and deionized H₂O was then added into each tube, the plates sealed and centrifuged briefly again. The four samples for each BAC were then pooled together. DNA was then precipitated by adding 1.5 μl of 7.5 M NH₄OAc and 100 μl of −20° C. 100% ethanol to each tube. Samples were mixed by pipetting up and down once. The plates were then sealed and incubated on ice for 10 minutes. Plates were centrifuged in a table topHaraeus centrifuge at 4000 rpm (3,290×g) for 30 minutes at 4° C. to recover the DNA. The supernatant was removed and excess liquid blotted onto paper towels. Pellets were washed by adding 100 μl of −20° C. 70% ethanol into each tube and re-centrifuging at 4000 rpm (3,290×g) for 10 minutes at 4° C. The supernatant was removed and excess liquid again removed by blotting on a paper towel. Remaining traces of liquid were removed by placing the plates upside down over a paper towel and centrifuging only until the centrifuge reached 800 rpm. Samples were then air dried at room temperature for 30 min. Tubes were capped and stored dry at −20° C. until electrophoresis. Immediately prior to electrophoresis the DNA was dissolved in 1.5 μl of Amersham loading dye. Plates were then sealed and centrifuged at 2000 rpm (825×g). The plates were then vortexed on a plate shaker for 1-2 minutes. Samples were then recentrifuged at 2000 rpm (825×g) briefly. Samples were then heated at 65° C. for 2 min and immediately placed on ice. Standard gel electrophoresis was performed on ABI 377 fluorescent sequencers according to the manufacturer's recommendation.

[0250] 9. Sub-cloning and Sequencing of HBM BAC DNA

[0251] The physical map of the Zmax1 (LRP5) gene region provides a set of BAC clones that contain within them the Zmax1 (LRP5) gene and the HBM gene. DNA sequencing of several of the BACs from the region has been completed. The DNA sequence data is a unique reagent that includes data that one skilled in the art can use to identify the Zmax1 (LRP5) gene and the HBM gene, or to prepare probes to identify the gene(s), or to identify DNA sequence polymorphisms that identify the gene(s).

[0252] BAC DNA was isolated according to one of two protocols, either a Qiagen purification of BAC DNA (Qiagen, Inc. as described in the product literature) or a manual purification which is a modification of the standard alkaline lysis/Cesium Chloride preparation of plasmid DNA (see e.g., Ausubel et al., Current Protocols in Molecular Biology, John Wiley & Sons (1997)). Briefly for the manual protocol, cells were pelleted, resuspended in GTE (50 mM glucose, 25 mM Tris-Cl (pH 8), 10 mM EDTA) and lysozyme (50 mg/ml solution), followed by NaOH/SDS (1% SDS/0.2 N NaOH) and then an ice-cold solution of 3 M KOAc (pH 4.5-4.8). RNaseA was added to the filtered supernatant, followed by Proteinase K and 20% SDS. The DNA was then precipitated with isopropanol, dried and resuspended in TE (10 mM Tris, 1 mM EDTA (pH 8.0)). The BAC DNA was further purified by Cesium Chloride density gradient centrifugation (Ausubel et al., 1997).

[0253] Following isolation, the BAC DNA was sheared hydrodynamically using an HPLC (Hengen, 1997 Trends in Biochem. Sci. 22: 273-4) to an insert size of 2000-3000 bp. After shearing, the DNA was concentrated and separated on a standard 1% agarose gel. A single fraction, corresponding to the approximate size, was excised from the gel and purified by electroelution (Sambrook et al., Molecular Cloning: A Laboratory Manual, Cold Spring Harbor Laboratory, Cold Spring, N.Y. (1989)).

[0254] The purified DNA fragments were then blunt-ended using T4 DNA polymerase. The blunt-ended DNA was then ligated to unique BstXI-linker adapters (5′-GTCTTCACCACG GGG-3′ and 5′-GTGGTGAAGAC-3′ in 100-1000 fold molar excess; SEQ ID NOS: 627 and 628 respectively). These linkers were complimentary to the BstXI-cut pMPX vectors (constructed by the inventors), while the overhang was not self-complimentary. Therefore, the linkers would not concatemerize nor would the cut-vector religate itself easily. The linker-adapted inserts were separated from the unincorporated linkers on a 1% agarose gel and purified using GeneClean (BIO 101, Inc.). The linker-adapted insert was then ligated to a modified pBlueScript vector to construct a “shotgun” subclone library. The vector contained an out-of-frame lacZ gene at the cloning site which became in-frame in the event that an adapter-dimer is cloned, allowing these to be avoided by their blue-color.

[0255] All subsequent steps were based on sequencing by ABI377 automated DNA sequencing methods. Only major modifications to the protocols are highlighted. Briefly, the library was then transformed into DH5α competent cells (Life Technologies, Bethesda, Md., DH5α transformation protocol). It was assessed by plating onto antibiotic plates containing ampicillin and IPTG/Xgal. The plates were incubated overnight at 37° C. Successful transformants were then used for plating of clones and picking for sequencing. The cultures were grown overnight at 37°. DNA was purified using a silica bead DNA preparation (Ng et al., 1996 Nucl. Acids Res. 24: 5045-7) method. In this manner, 25 μg of DNA was obtained per clone.

[0256] These purified DNA samples were then sequenced using ABI dye-terminator chemistry. The ABI dye terminator sequence reads were run on ABI377 machines and the data was directly transferred to UNIX machines following lane tracking of the gels. All reads were assembled using PHRAP (P. Green, Abstracts of DOE Human Genome Program Contractor-Grantee Workshop V, Jan. 1996, p.157) with default parameters and quality scores. The initial assembly was done at 6-fold coverage and yielded an average of 8-15 contigs. Following the initial assembly, missing mates (sequences from clones that only gave one strand reads) were identified and sequenced with ABI technology to allow the identification of additional overlapping contigs. Primers for walking were selected using a Genome Therapeutics program Pick_primer near the ends of the clones to facilitate gap closure. These walks were sequenced using the selected clones and primers. Data were reassembled with PHRAP into sequence contigs.

[0257] 10. Gene Identification by Computational Methods

[0258] Following, assembly of the BAC sequences into contigs, the contigs were subjected to computational analyses to identify coding regions and regions bearing DNA sequence similarity to known genes. This protocol included the following steps.

[0259] 1. Degap the contigs: the sequence contigs often contain symbols (denoted by a period symbol) that represent locations where the individual ABI sequence reads have insertions or deletions. Prior to automated computational analysis of the contigs, the periods were removed. The original data was maintained for future reference.

[0260] 2. BAC vector sequences were “masked” within the sequence by using the program cross match (Phil Green, http:\\chimera.biotech.washington.edu\UWGC). Since the shotgun libraries construction detailed above leaves some BAC vector in the shotgun libraries, this program was used to compare the sequence of the BAC contigs to the BAC vector and to mask any vector sequence prior to subsequent steps. Masked sequences were marked by an “X” in the sequence files, and remained inert during subsequent analyses.

[0261] 3. E. coli sequences contaminating the BAC sequences were masked by comparing the BAC contigs to the entire E. coli DNA sequence.

[0262] 4. Repetitive elements known to be common in the human genome were masked using cross match. In this implementation of crossmatch, the BAC sequence was compared to a database of human repetitive elements (Jerzy Jerka, Genetic Information Research Institute, Palo Alto, Calif.). The masked repeats were marked by X and remained inert during subsequent analyses.

[0263] 5. The location of exons within the sequence was predicted using the MZEF computer program (Zhang, 1997 Proc. Natl. Acad. Sci USA. 94: 565-8).
[0264] 6. The sequence was compared to the publicly available unigene database (National Center for Biotechnology Information, National Library of Medicine, 38A, 8N905, 8600 Rockville Pike, Bethesda, Md. 20894; www.ncbi.nlm.nih.gov) using the blastn2 algorithm (Altschul et al, 1997 Nucl. Acids Res. 25: 3389-3402). The parameters for this search were: E=0.05, v=50, B=50 (where E is the expected probability score cutoff, V is the number of database entries returned in the reporting of the results, and B is the number of sequence alignments returned in the reporting of the results (Altschul et al., J. Mol. Biol., 215:403-410 (1990)).
[0265] 7. The sequence was translated into protein for all six reading frames, and the protein sequences were compared to a non-redundant protein database compiled from Genpept Swissprot PIR (National Center for Biotechnology Information, National Library of Medicine, 38A, 8N905, 8600 Rockville Pike, Bethesda, Md. 20894; www.ncbi.nlm.nih.gov). The parameters for this search were E=0.05, V=50, B=50, where E, V, and B are defined as above.
[0266] 8. The BAC DNA sequence was compared to the database of the cDNA clones derived from direct selection experiments (described below) using blastn2 (Altschul et al., 1997). The parameters for this search were E=0.05, V=250, B=250, where E, V, and B are defined as above.
[0267] 9. The BAC sequence was compared to the sequences of all other BACs from the HBM region on chromosome 11q12-13 using blastn2 (Altschul et al., 1997). The parameters for this search were E=0.05, V=50, B=50, where E, V, and B are defined as above.
[0268] 10. The BAC sequence was compared to the sequences derived from the ends of BACs from the HBM region on chromosome 11q12-13 using blastn2 (Altschul et al., 1997). The parameters for this search were E=0.05, V=50, B=50, where E, V, and B are defined as above.
[0269] 11. The BAC sequence was compared to the GenBank database (National Center for Biotechnology Information, National Library of Medicine, 38A, 8N905, 8600 Rockville Pike, Bethesda, Md. 20894; www.ncbi.nlm.nih.gov) using blastn2 (Altschul et al., 1997). The parameters for this search were E=0.05, V=50, B=50, where E, V, and B are defined as above.
[0270] 12. The BAC sequence was compared to the STS division of GenBank database (National Center for Biotechnology Information, National Library of Medicine, 38A, 8N905, 8600 Rockville Pike, Bethesda, Md. 20894; www.ncbi.nlm.nih.gov) using blastn2 (Altschul et al., 1997). The parameters for this search were E=0.05, V=50, B=50, where E, V, and B are defined as above.
[0271] 13. The BAC sequence was compared to the Expressed Sequence (EST) Tag GenBank database (National Center for Biotechnology Information, National Library of Medicine, 38A, 8N905, 8600 Rockville Pike, Bethesda, Md. 20894; www.ncbi.nlr.nih.gov) using blastn2 (Altschul et al., 1997). The parameters for this search were E=0.05, V=250, B=250, where E, V, and B are defined as above.
   11. Gene Identification by Direct cDNA Selection

[0273] Primary Tinkered cDNA pools were prepared from bone marrow, calvarial bone, femoral bone, kidney, skeletal muscle, testis and total brain. Poly (A)+RNA was prepared from calvarial and femoral bone tissue (Chomczynski et al., 1987 Asial. Biochem. 162: 156-9; and D'Alessio et al., 1987 Focus 9: 1-4) and the remainder of the mRNA was purchased from Clontech (Palo Alto, Calif.). In order to generate oligo(dT) and random primed cDNA pools from the same tissue, 2.5 μg mRNA was mixed with oligo(dT) primer in one reaction and 2.5 μg mRNA was mixed with random hexamers in another reaction, and both were converted to first and second strand cDNA according to manufacturers recommendations (Life Technologies, Bethesda, Md.). Paired phosphorylated cDNA linkers (see sequence below) were annealed together by mixing in a 1:1 ratio (10 μg each) incubated at 65° C. for five minutes and allowed to cool to room temperature.

| | |
|---|---|
| Paired linkers oligo 1/2 | |
| OLIGO 1: | |
| 5′-CTG AGC GGA ATT CGT GAG ACC-3′ | (SEQ ID NO: 12) |
| OLIGO 2: | |
| 5′-TTG GTC TCA CGT ATT CCG CTC | (SEQ ID NO: 13) |
| GA-3′ | |
| Paired linkers oligo3/4 | |
| OLIGO 3: | |
| 5′-CTC GAG AAT TCT GGA TCC TC-3′ | (SEQ ID NO: 14) |
| OLIGO 4: | |
| 5′-TTG AGG ATC CAG AAT TCT CGA | (SEQ ID NO: 15) |
| G-3′ | |
| Paired linkers oligo5/6 | |
| OLIGO 5: | |
| 5′-TGT ATG CGA ATT CGC TGC GCG-3′ | (SEQ ID NO: 16) |
| OLIGO 6: | |
| 5′-TTC GCG CAG CGA ATT CGC ATA | (SEQ ID NO: 17) |
| CA-3′ | |
| Paired linkers oligo7/8 | |
| OLIGO 7: | |
| 5′-GTC CAC TGA ATT CTC AGT GAG-3′ | (SEQ ID NO: 18) |
| OLIGO 8: | |
| 5′-TTG TCA CTG AGA ATT CAG TGG | (SEQ ID NO: 19) |
| AC-3′ | |
| Paired linkers oligo11/12 | |
| OLIGO 11: | |
| 5′-GAA TCC GAA TTC CTG GTC AGC-3′ | (SEQ ID NO: 20) |
| OLIGO 12: | |
| 5′-TTG CTG ACC AGG AAT TCG GAT | (SEQ ID NO: 21) |
| TC-3′ | |

[0274] Linkers were ligated to all oligo(dT) and random primed cDNA pools (see below) according to manufacturers instructions (Life Technologies, Bethesda, Md.).

[0275] Oligo ½ was ligated to oligo(dT) and random primed cDNA pools prepared from bone marrow. Oligo ¾ was ligated to oligo(dT) and random primed cDNA pools prepared from calvarial bone. Oligo ⅚ was ligated to oligo(dT) and random primed cDNA pools prepared from brain and skeletal muscle. Oligo ⅞ was ligated to oligo(dT) and random primed cDNA pools prepared from kidney. Oligo 11/12 was ligated to oligo(dT) and random primed cDNA pools prepared from femoral bone.

[0276] The cDNA pools were evaluated for length distribution by PCR amplification using 1 μl of a 1:1, 1:10, and 1:100 dilution of the ligation reaction, respectively. PCR reactions were performed in a Perkin Elmer 9600, each 25 μl volume reaction contained 1 μl of DNA, 10 mM Tris-HCl (pH 8.3), 50 mM KCl, 1.5 mM MgCl₂, 0.001% gelatin, 200 mM each dNTPs, 10 μM primer and 1 unit Taq DNA polymerase (Perkin Elmer) and was amplified under the following, conditions: 30 seconds at 94° C., 30 seconds at 60° C. and 2 minutes at 72° C. for 30 cycles. The length distribution of the amplified cDNA pools were evaluated by electrophoresis on a 1% agarose gel. The PCR reaction that gave the best representation of the random primed and oligo(dT) primed cDNA pools was scaled up so that ˜2-3 μg of each cDNA pool was produced. The starting cDNA for the direct selection reaction comprised of 0.5 μg of random primed cDNAs mixed with 0.5 μg of oligo(dT) primed cDNAs.

[0277] The DNA from the 54 BACs that were used in the direct cDNA selection procedure was isolated using Nucleobond AX columns as described by the manufacturer (The Nest Group, Inc.).

[0278] The BACs were pooled in equimolar amounts and 1 μg of the isolated genomic DNA was labeled with biotin 16-UTTP by nick translation in accordance with the manufacturers instructions (Boehringer Mannheim). The incorporation of the biotin was monitored by methods that could be practiced by one skilled in the art (Del Mastro et al., Methods in Molecular Biology, Humana Press Inc., NJ (1996)).

[0279] Direct cDNA selection was performed using methods that could be practiced by one skilled in the art (Del Mastro et al., 1996). Briefly, the cDNA pools were multiplexed in two separate reactions: In one reaction cDNA pools from bone marrow, calvarial bone, brain and testis were mixed, and in the other cDNA pools from skeletal muscle, kidney and femoral bone were mixed. Suppression of the repeats, yeast sequences and plasmid in the cDNA pools was performed to a Cot of 20. 100 ng of biotinylated BAC DNA was mixed with the suppressed cDNAs and hybridized in solution to a Cot of 200. The biotinylated DNA and the cognate cDNAs was captured on streptavidin-coated paramagnetic beads. The beads were washed and the primary selected cDNAs were eluted. These cDNAs were PCR amplified and a second round of direct selection was performed. The product of the second round of direct selection is referred to as the secondary selected material. A Galani1 cDNA clone, previously shown to map to 11q12-13 (Evans, 1993 Genomics 18: 473-7), was used to monitor enrichment during the two rounds of selection.

[0280] The secondary selected material from bone marrow, calvarial bone, femoral bone, kidney, skeletal muscle, testis and total brain was PCR amplified using modified primers of oligos 1, 3, 5, 7 and 11, shown below, and cloned into the UDG vector pAMP10 (Life Technologies, Bethesda, Md.), in accordance with the manufacturer's recommendations.

[0281] Modified primer sequences:

| | SEQ | |
|---|---|---|
| Primer | ID NO. | Sequence |
| Oligo 1 | 22 | 5′-CUA CUA CUA CUA CTG AGC GGA ATT |
| | | CGT GAG ACC-3′ |
| Oligo 3 | 23 | 5′-CUA CUA CUA CUA CTC GAG AAT TCT |
| | | GGA TCC TC-3′ |
| Oligo 5 | 24 | 5′-CUA CUA CUA CUA TGT ATG CGA ATT |
| | | CGC TGC GCG-3′ |
| Oligo 7 | 25 | 5′-CUA CUA CUA CUA GTC CAC TGA ATT |
| | | CTC AGT GAG-3′ |
| Oligo 11 | 26 | 5′-CUA CUA CUA CUA GAA TCC GAA TTC |
| | | CTG GTC AGC-3′ |

[0282] The cloned secondary selected material, from each tissue source, was transformed into MAX Efficiency DH5a Competent Cells (Life Technologies, Bethesda, Md.) as recommended by the manufacturer. 384 colonies were picked from each transformed source and arrayed into four 96 well microtiter plates.

[0283] All secondarily selected cDNA clones were sequenced using M13 dye primer terminator cycle sequencing kit (Applied Biosystems), and the data collected by the ABI 377 automated fluorescence sequencer (Applied Biosystems).

[0284] All sequences were analyzed using the BLASTN, BLASTX and FASTA programs (Altschul et al., 1990 J. Mol. Biol. 215: 403-410; and Altschul et al., Nucl. Acids. Res. 25: 3389-3402). The cDNA sequences were compared to a database containing sequences derived from human repeats, mitochondrial DNA, ribosomal RNA, E. coli DNA to remove background clones from the dataset using the program cross_match. A further round of comparison was also performed using the program BLASTN2 against known genes (GenBank) and the BAC sequences from the HBM region. Those cDNAs that were >90% homologous to these sequences were filed according to the result and the data stored in a database for further analysis. cDNA sequences that were identified but did not have significant similarity to the BAC sequences from the HBM region or were eliminated by cross_match were hybridized to nylon membranes which contained the BACs from the HBM region, to ascertain whether they hybridized to the target.

[0285] Hybridization analysis was used to map the cDNA clones to the BAC target that selected them. The BACs that were identified from the HBM region were arrayed and grown into a 96 well microtiter plate. LB agar containing 25 μg/ml kanamycin was poured into 96 well microtiter plate lids. Once the agar had solidified, pre-cut Hybond N+nylon membranes (Amersham) were laid on top of the agar and the BACs were stamped onto the membranes in duplicate using a hand held 96 well replica plater (V&P Scientific, Inc.). The plates were incubated overnight at 37° C. The membranes were processed according to the manufacturers recommendations.

[0286] The cDNAs that needed to be mapped by hybridization were PCR amplified using the relevant primer (oligos 1, 3, 5, 7 and 11) that would amplify that clone. For this PCR amplification, the primers were modified to contain a linkered digoxigenin molecule at the 5′ of the oligonucleotide. The PCR amplification was performed under the same conditions as described in Preparation of cDNA Pools (above). The PCR products were evaluated for quality and quantity by electrophoresis on a 1% agarose gel by loading 5 μl of the PCR reaction. The nylon membranes containing the stamped BACs were individually pre-hybridized in 50 ml conical tubes containing 10 ml of hybridization solution (5×SSPE, 0.5×Blotto, 2.5% SDS and 1 mM EDTA (pH 8.0)). The 50 ml conical tubes were placed in a rotisserie oven (Robbins Scientific) for 2 hours at 65° C. Twenty-five ng of each cDNA probe was denatured and added into individual 50 ml conical tubes containing the nylon membrane and hybridization solution. The hybridization was performed overnight at 65 ° C. The filters were washed for 20 minutes at 65° C. in each of the following solutions: 3×SSPE, 0.1% SDS; 1×SSPE, 0.1% SDS and 0.1×SSPE, 0.1% SDS.

[0287] The membranes were removed from the 50 ml conical tubes and placed in a dish. Acetate sheets were placed between each membrane to prevent them from sticking to each other. The incubation of the membranes with the Anti-DIG-AP and CDP-Star was performed according to manufacturers recommendations (Boehringer Mannheim). The membranes were wrapped in Saran wrap and exposed to Kodak Bio-Max X-ray film for 1 hour.

[0288] 12. cDNA Cloning and Expression Analysis

[0289] To characterize the expression of the genes identified by direct cDNA selection and genomic DNA sequencing in comparison to the publicly available databases, a series of experiments were performed to further characterize the genes in the HBM region. First, oligonucleotide primers were designed for use in the polymerase chain reaction (PCR) so that portions of a cDNA, EST, or genomic DNA could be amplified from a pool of DNA molecules (a cDNA library) or RNA population (RT-PCR and RACE). The PCR primers were used in a reaction containing genomic DNA to verify that they generated a product of the size predicted based on the genomic (BAC) sequence. A number of cDNA libraries were then examined for the presence of the specific cDNA or EST. The presence of a fragment of a transcription unit in a particular cDNA library indicates a high probability that additional portions of the same transcription unit will be present as well.

[0290] A critical piece of data that is required when characterizing novel genes is the length, in nucleotides, of the processed transcript or messenger RNA (mRNA). One skilled in the art primarily determines the length of an mRNA by Northern blot hybridization (Sambrook et al., Molecular Cloning: A Laboratory Manual, ColdSpring Harbor Laboratory, Cold Spring Harbor N.Y. (1989)). Groups of ESTs and direct-selected cDNA clones that displayed significant sequence similarity to sequenced BACs in the critical region were grouped for convenience into approximately 30 kilobase units. Within each 30 kilobase unit there were from one up to fifty ESTs and direct-selected cDNA clones which comprised one or more independent transcription units. One or more ESTs or direct-selected cDNAs were used as hybridization probes to determine the length of the mRNA in a variety of tissues, using commercially available reagents (Multiple Tissue Northern blot; Clontech, Palo Alto, Calif.) under conditions recommended by the manufacturer.

[0291] Directionally cloned cDNA libraries from femoral bone, and calvarial bone tissue were constructed by methods familiar to one skilled in the art (for example, Soares in Automated DNA Sequencing and Analysis, Adams, Fields and Venter, Eds., Academic Press, NY, pages 110-114 (1994)). Bones were initially broken into fragments with a hammer, and the small pieces were frozen in liquid nitrogen and reduced to a powder in a tissue pulverizer (Spectrum Laboratory Products). RNA was extracted from the powdered bone by homogenizing the powdered bone with a standard Acid Guanidinium Thiocyanate-Phenol-Chloroform extraction buffer (e.g., Chomczynski et al., 1987 Anal. Biochem. 162: 156-9) using a polytron homogenizer (Brinkman Instruments). Additionally, human brain and lung total RNA was purchased from Clontech. PolyA RNA was isolated from total RNA using dynabeads-dT according to the manufacturer's recommendations (Dynal, Inc.). First strand cDNA synthesis was initiated using an oligonucleotide primer with the sequence: 5′-AACTGGAAGAATTCGCGCTCGAGGAATTTTTTTTTTTTTTTT TT-3′ (SEQ ID NO:27). This primer introduces a NotI restriction site (underlined) at the 3′, end of the cDNA. First and second strand synthesis were performed using the “one-tube” cDNA synthesis kit as described by the manufacturer (Life Technologies, Bethesda, Md.). Double stranded cDNAs were treated with T4 polynucleotide kinase to ensure that the ends of the molecules were blunt (Soares in Automated DNA Sequencing and Analysis, Adams, Fields and Venter, Eds., Academic Press, NY, pages 110-114 (1994)), and the blunt ended cDNAs were then size selected by a Biogel column (Huynh et al. in DNA Cloning, Vol. 1, Glover, Ed., IRL Press, Oxford, pages 49-78 (1985)) or with a size-sep 400 Sepharose column (Pharmacia, catalog #27-5105-01). Only cDNAs of 400 base pairs or longer were used in subsequent steps. EcoRI adapters (sequence: 5′ OH-AATTCGGCACGAG-OH 3′ (SEQ ID NO:28), and 5′p-CTCGTGCCG-OH 3′ (SEQ ID NO:29)) were then ligated to the double stranded cDNAs by methods familiar to one skilled in the art (Soares 1994). The EcoRI adapters were then removed from the 3′ end of the cDNA by digestion with NotI (Soares, 1994). The cDNA was then ligated into the plasmid vector pBluescript® II KS+(Stratagene, La Jolla, Calif.), and the ligated material was transformed into E. coli host DH10B or DH12S by electroporation methods familiar to one skilled in the art (Soares, 1994). After growth overnight at 37° C., DNA was recovered from the E. coli colonies after scraping the plates by processing as directed for the Mega-prep kit (Qiagen, Chatsworth, Calif.). The quality of the cDNA libraries was estimated by counting a portion of the total numbers of primary transformants and determining the average insert size and the percentage of plasmids with no cDNA insert. Additional cDNA libraries (human total brain, heart, kidney, leukocyte, and fetal brain) were purchased from Life Technologies, Bethesda, Md.

[0292] cDNA libraries, both oligo (dT) and random hexamer (N₆) primed, were used for isolating cDNA clones transcribed within the HBM region: human bone, human brain, human kidney and human skeletal muscle (all cDNA libraries were made by the inventors, except for skeletal muscle (dT) and kidney (dT) cDNA libraries). Four 10×10 arrays of each of the cDNA libraries were prepared as follows: the cDNA libraries were titered to 2.5×10⁶ using primary transformants. The appropriate volume of frozen stock was used to inoculate 2 L of LB/ampicillin (100 mg/ml). This inoculated liquid culture was aliquoted into 400 tubes of 4 ml each. Each tube contained approximately 5000 cfu. The tubes were incubated at 30° C. overnight with gentle agitation. The cultures were grown to an OD of 0.7-0.9. Frozen stocks were prepared for each of the cultures by allocating 100 μl of culture and 300 μl of 80% glycerol. Stocks were frozen in a dry ice/ethanol bath and stored at −70° C. The remaining culture was DNA prepared using the Qiagen (Chatsworth, Calif.) spin miniprep kit according to the manufacturer's instructions. The DNAs from the 400 cultures were pooled to make 80 column and row pools. The cDNA libraries were determined to contain HBM cDNA clones of interest by PCR. Markers were designed to amplify putative exons. Once a standard PCR optimization was performed and specific cDNA libraries were determined to contain cDNA clones of interest, the markers were used to screen the arrayed library. Positive addresses indicating the presence of cDNA clones were confirmed by a second PCR using the same markers.

[0293] Once a cDNA library was identified as likely to contain cDNA clones corresponding to a specific transcript of interest from the HBM region, it was manipulated to isolate the clone or clones containing cDNA inserts identical to the EST or direct-selected cDNA of interest. This was accomplished by a modification of the-standard “colony screening” method (Sambrook et al., Molecular Cloning: A Laboratory Manual, Cold Spring Harbor Laboratory, Cold Spring Harbor N.Y. (1989)). Specifically, twenty 150 mn LB+ampicillin agar plates were spread with 20,000 colony forming units (cfu) of cDNA library and the colonies allowed to grow overnight at 37° C. Colonies were transferred to nylon filters (Hybond from Amersham, or equivalent) and duplicates prepared by pressing two filters together essentially as described (Sambrook et al., Molecular Cloning: A Laboratory Manual, Cold Spring Harbor Laboratory, Cold Spring Harbor N.Y. (1989)). The “master” plate was then incubated an additional 6-8 hours to allow the colonies to grow back. The DNA from the bacterial colonies was then affixed to the nylon filters by treating the filters sequentially with denaturing solution (0.5 N NaOH, 1.5 M NaCl) for two minutes, neutralization solution (0.5 M Tris-Cl pH 8.0, 1.5 M NaCl) for two minutes (twice). The bacterial colonies were removed from the filters by washing in a solution of 2×SSC/0.1% SDS for one minute while rubbing with tissue paper. The filters were air dried and baked under vacuum at 80° C. for 1-2 hours.

[0294] A cDNA hybridization probe was prepared by random hexamer labeling (Fineberg and Vogelstein, Anal. Biochem., 132:6-13 (1983)) or by including gene-specific primers and no random hexamers in the reaction (for small fragments). Specific activity was calculated and was >5×10⁸ cpm/10⁸ μg of cDNA. The colony membranes were then prewashed in 10 mM Tris-Cl pH 8.0, 1 M NaCl, 1 mM EDTA, 0.1% SDS for 30 minutes at 55 ° C. Following 5 the prewash, the filters were prehybridized in >2 ml/filter of 6×SSC, 50% deionized formamide, 2% SDS, 5×Denhardt's solution, and 100 mg/ml denatured salmon sperm DNA, at 42° C. for 30 minutes. The filters were then transferred to hybridization solution (6×SSC, 2% SDS, 5×Denhardt's, 100 mg/ml denatured salmon sperm DNA) containing denatured α³²P-dCTP-labeled cDNA probe and incubated at 42° C. for 16-18 hours.

[0295] After the 16-18 hour incubation, the filters were washed under constant agitation in 2×SSC, 2% SDS at room temperature for 20 minutes, followed by two washes at 65° C. for 15 minutes each. A second wash was performed in 0.5×SSC, 0.5% SDS for 15 minutes at 65° C. Filters were then wrapped in plastic wrap and exposed to radiographic film for several hours to overnight. After film development, individual colonies on plates were aligned with the autoradiograph so that they could be picked into a 1 ml solution of LB Broth containing ampicillin. After shaking at 37° C. for 1-2 hours, aliquots of the solution were plated on 150 mm plates for secondary screening. Secondary screening was identical to primary screening (above) except that it was performed on plates containing ˜250 colonies so that individual colonies could be clearly identified for picking.

[0296] After colony screening with radiolabeled probes yielded cDNA clones, the clones were characterized by restriction endonuclease cleavage, PCR, and direct sequencing to confirm the sequence identity between the original probe and the isolated clone. To obtain the full-length cDNA, the novel sequence from the end of the clone identified was used to probe the library again. This process was repeated until the length of the cDNA cloned matches that estimated to be full-length by the northern blot analysis.

[0297] RT-PCR was used as another method to isolate full length clones. The cDNA was synthesized and amplified using a “Superscript One Step RT-PCR” kit (Life Technologies, Gaithersburg, Md.). The procedure involved adding 1.5 μg of RNA to the following: 25 μl of reaction mix provided which is a proprietary buffer mix with MgSO₄ and dNTP's, 1 μl sense primer (10 μM) and 1 μl anti-sense primer (10 μM), 1 μl reverse transcriptase and Taq DNA polymerase mix provided and autoclaved water to a total reaction mix of 50 μl. The reaction was then placed in a thermocycler for 1 cycle at 50° C. for 15 to 30 minutes, then 94° C. for 15 seconds, 55-60° C. for 30 seconds and 68-72° C. for 1 minute per kilobase of anticipated product and finally 1 cycle of 72° C. for 5-10 minutes. The sample was analyzed on an agarose gel. The product was excised from the gel and purified from the gel (GeneClean, Bio 101). The purified product was cloned in pCTNR (General Contractor DNA Cloning System, 5 Prime-3 Prime, Inc.) and sequenced to verify that the clone was specific to the gene of interest.

[0298] Rapid Amplification of cDNA ends (RACE) was performed following the manufacturer's instructions using a Marathon cDNA Amplification Kit (Clontech, Palo Alto, Calif.) as a method for cloning the 5′ and 3′ ends of candidate genes. cDNA pools were prepared from total RNA by perfomiing first strand synthesis, where a sample of total RNA sample was mixed with a modified oligo (dT) primer, heated to 70° C., cooled on ice and followed by the addition of: 5×first strand buffer, 10 mM dNTP mix, and AMV Reverse Transcriptase (20 U/μl). The tube was incubated at 42° C. for one hour and then the reaction tube was placed on ice. For second strand synthesis, the following components were added directly to the reaction tube: 5×second strand buffer, 10 mM dNTP mix, sterile water, 20×second strand enzyme cocktail and the reaction tube was incubated at 16° C. for 1.5 hours. T4 DNA Polymerase was added to the reaction tube and incubated at 16° C. for 45 minutes. The second-strand synthesis was terminated with the addition of an EDTA/Glycogen mix. The sample was subjected to a phenol/chloroform extraction and an ammonium acetate precipitation. The cDNA pools were checked for quality by analyzing on an agarose gel for size distribution. Marathon cDNA adapters (Clontech) were then ligated onto the cDNA ends. The specific adapters contained priming sites that allowed for amplification of either 5′ or 3′ ends, depending on the orientation of the gene specific primer (GSP) that was chosen. An aliquot of the double stranded cDNA was added to the following reagents: 10 μM Marathon cDNA adapter, 5×DNA ligation buffer, T4 DNA ligase. The reaction was incubated at 16° C. overnight. The reaction was heat inactivated to terminate the reaction. PCR was performed by the addition of the following to the diluted double stranded cDNA pool: 10×cDNA PCR reaction buffer, 10 μM dNTP mix, 10 μM GSP, 10 μM AP1 primer (kit), 50×Advantage cDNA Polymerase Mix. Thermal Cycling conditions were 94° C. for 30 seconds, 5 cycles of 94° C. for 5 seconds, 72° C. for 4 minutes, 5 cycles of 94° C. for 5 seconds, 70° C. for 4 minutes, 23 cycles of 94° C. for 5 seconds, 68° C. for 4 minutes. After the first round of PCR was performed using the GSP to extend to the end of the adapter to create the adapter primer binding site, exponential amplification of the specific cDNA of interest was observed. Usually a second nested PCR is preformed to confirm the specific cDNA. The RACE product was analyzed on an agarose gel and then excised and purified from the gel (GeneClean, BIO 101). The RACE product was then cloned into pCTNR (General Contractor DNA Cloning System, 5′-3′, Inc.) and the DNA sequence determined to verify that the clone is specific to the gene of interest.

[0299] 13. Mutation Analysis

[0300] Comparative genes were identified using the above procedures and the exons from each gene were subjected to mutation detection analysis. Comparative DNA sequencing was used to identify polymorphisms in HBM candidate genes from chromosome 11q12-13. DNA sequences for candidate genes were amplified from patient lymphoblastoid cell lines.

[0301] The inventors developed a method based on analysis of direct DNA sequencing of PCR products amplified from candidate regions to search for the causative polymorphism. The procedure consisted of three stages that used different subsets of HBM family to find segregating polymorphisms and a population panel to assess the frequency of the polymorphisms. The family resources result from a single founder leading to the assumption that all affected individuals will share the same causative polymorphism.

[0302] Candidate regions were first screened in a subset of the HBM family consisting of the proband, daughter, and her mother, father and brother. Monochromosomal reference sequences were produced concurrently and used for comparison. The mother and daughter carried the HBM polymorphism in this nuclear family, providing the ability to monitor polymorphism transmission. The net result is that two HBM chromosomes and six non-HBM chromosomes were screened. This allowed exclusion of numerous frequent alleles. Only alleles exclusively present in the affected individuals passed to the next level of analysis.

[0303] Polymorphisms that segregated exclusively with the HBM phenotype in this original family were then re-examined in an extended portion of the HBM pedigree consisting of two additional nuclear families. These families consisted of five HBM and three unaffected individuals. The HBM individuals in this group included the two critical crossover individuals, providing the centromeric and telomeric boundaries of the critical region. Tracking the heredity of polymorphisms between these individuals and their affected parents allowed for further refining of the critical region. This group brought the total of HBM chromosomes screened to seven and the total of non-HBM chromosomes to seventeen.

[0304] When a given polymorphism continued to segregate exclusively with the HBM phenotype in the extended group, a population panel was then examined. This panel of 84 persons consisted of 42 individuals known to have normal bone mineral density and 42 individuals known to be unrelated but with untyped bone mineral density. For this purpose, normal bone mineral density is within two standard deviations of a BMD Z score of 0. The second group was from the widely used CEPH panel of individuals. Any segregating polymorphisms found to be rare in this population were subsequently examined on the entire HBM pedigree and a larger population.

[0305] Polymerase chain reaction (PCR) was used to generate sequencing templates from the HBM family's DNA and monochromosomal controls. Enzymatic amplification of genes within the HBM region on 11q12-13 was accomplished using the PCR with oligonucleotides flanking each exon as well as the putative 5′ regulatory elements of each gene. The primers were chosen to amplify each exon as well as 15 or more base pairs within each intron on either side of the splice. All PCR primers were made as chimeras to facilitate dye primer sequencing. The M13-21F (5′- GTA A CGA CGG CCA GT-3′) (SEQ ID NO:30) and —28REV (5′-AAC AGC TAT GAC CAT G -3′) (SEQ ID NO:31) primer binding sites were built on to the 5′ end of each forward and reverse PCR primer, respectively, during synthesis. 150 ng of genomic DNA was used in a 50 μl PCR with 2 U AmpliTaq, 500 nM primer and 125 μM dNTP. Buffer and cycling conditions were specific to each primer set. TaqStart antibody (Clontech) was used for hot start PCR to minimize primer dimer formation. 10% of the product was examined on an agarose gel. The appropriate samples were diluted 1:25 with deionized water before sequencing.

[0306] Each PCR product was sequenced according to the standard Energy Transfer primer (Amersham) protocol. All reactions took place in 96 well trays. 4 separate reactions, one each for A, C, G and T were performed for each template. Each reaction included 2 μl of the sequencing reaction mix and 3 μl of diluted template. The plates were then heat sealed with foil tape and placed in a thermal cycled and cycled according to the manufacturer's recommendation. After cycling, the 4 reactions were pooled. 3 μl of the pooled product was transferred to a new 96 well plate and 1 μl of the manufacturer's loading dye was added to each well. All 96 well pipetting procedures occurred on a Hydra 96 pipetting station (Robbins Scientific, USA). 1 μl of pooled material was directly loaded onto a 48 lane gel running on an ABI 377 DNA sequencer for a 10 hour, 2.4 kV run.

[0307] Polyphred (University of Washington) was used to assemble sequence sets for viewing with Consed (University of Washington). Sequences were assembled in groups representing all relevant family members and controls for a specified target region. This was done separately for each of the three stages. Forward and reverse reads were included for each individual along with reads from the monochromosomal templates and a color annotated reference sequence. Polyphred indicated potential polymorphic sites with a purple flag. Two readers independently viewed each assembly and assessed the validity of the purple-flagged sites.

[0308] A total of 23 exons present in the mature mRNA and several other portions of the primary transcript were evaluated for heterozygosity in the nuclear family of two HBM-affected and two unaffected individuals. 25 SNPs were identified, as shown in the table below.

TABLE 8
Single Nucleotide Polymorphisms in the
Zmax1 (LRP5) Gene and Environs

| Exon Name | Location | Base Change |
|---|---|---|
| b200e21-h_Contig1_1.nt | 69169 (309G) | C/A |
| b200e21-h_Contig4_12.nt | 27402 (309G) | A/G |
| b200e21-h_Contig4_13.nt | 27841 (309G) | T/C |
| b200e21-h_Contig4_16.nt | 35600 (309G) | A/G |
| b200e21-h_Contig4_21.nt | 45619 (309G) | G/A |
| b200e21-h_Contig4_22.nt-a | 46018 (309G) | T/G |
| b200e21-h_Contig4_22.nt-b | 46093 (309G) | T/G |
| b200e21-h_Contig4_22.nt-c | 46190 (309G) | A/G |
| b200e21-h_Contig4_24.nt-a | 50993 (309G) | T/C |
| b200e21-h_Contig4_24.nt-b | 51124 (309G) | C/T |
| b200e21-h_Contig4_25.nt | 55461 (309G) | C/T |
| b200e21-h_Contig4_33.nt-a | 63645 (309G) | C/A |
| b200e21-h_Contig4_33.nt-b | 63646 (309G) | A/C |
| b200e21-h_Contig4_61.nt | 24809 (309G) | T/G |
| b200e21-h_Contig4_62.nt | 27837 (309G) | T/C |
| b200e21-h_Contig4_63.nt-a | 31485 (309G) | C/T |
| b200e21-h_Contig4_63.nt-b | 31683 (309G) | A/G |
| b200e21-h_Contig4_9.nt | 24808 (309G) | T/G |
| b527d12-h_Contig030g_1.nt-a | 31340 (308G) | T/C |
| b527d12-h_Contig030g_1.nt-b | 32538 (308G) | A/G |
| b527d12-h_Contig080C_2.nt | 13224 (308G) | A/G |
| b527d12-h_Contig087C_1.nt | 21119 (308G) | C/A |
| b527d12-h_Contig087C_4.nt | 30497 (308G) | G/A |
| b527d12-h_Contig088C_4.nt | 24811 (309G) | A/C |
| b527d12-h_Contig089_1HP.nt | 68280 (309G) | G/A |

In addition to the polymorphisms presented in Table 8, two additional polymorphisms can also be present in SEQ ID NO:2. These is a change at position 2002 of SEQ ID NO:2. Either a guanine or an adenine can appear at this position. This polymorphism is silent and is not associated with any change in the amino acid sequence. The second change is at position 4059 of SEQ ID NO:2 corresponding in a cytosine (C) to thymine (T) change. This polymorphism results in a corresponding amino acid change from a valine (V) to an alanine (A). Other polymorphisms were found in the candidate gene exons and adjacent intron sequences as displayed in Tables 2 and 3. Any one or combination of the polymorphisms listed in Tables 2, 3 or 8 or the two discussed above could also have a minor effect on bone mass when present in SEQ ID NO:2. These could also be in combination with any of the other mutations discussed in Section 3 and in the Examples below.

[0310] The present invention encompasses the nucleic acid sequences having the nucleic acid sequence of SEQ ID NO: 1 with any one or more of the above-identified point mutations.

[0311] Preferably, the present invention encompasses the nucleic acid of SEQ ID NO: 2 or is a mutation in SEQ ID NO: 1 that produces a phenotype like that observed with the protein encoded by SEQ ID NO:2 (HBM phenotype). Specifically, a base-pair substitution changing G to T at position 582 in the coding sequence of Zmax1 (the HBM gene) was identified as heterozygous in all HBM individuals, and not found in the unaffected individuals (i.e., b527d12-h_Contig087C_{—}1.nt). FIG. 6 shows the order of the contigs in B527D12. The direction of transcription for the HBM gene is from left to right. The sequence of contig308G of B527D12 is the reverse complement of the coding region to the HBM gene. Therefore, the relative polymorphism in contig 308G shown in Table 8 as a base change substitution of C to A is the complement to the G to T substitution in the HBM gene. This mutation causes a substitution of glycine 171 with valine (G171V).

[0312] The HBM polymorphism was confirmed by examining the DNA sequence of different groups of individuals. In all members of the HBM pedigree (38 individuals), the HBM polymorphism was observed in the heterozygous form in affected (i.e., elevated bone mass) individuals only (N=18). In unaffected relatives (N=20) (BMDZ<2.0), the HBM polymorphism was never observed. To determine whether this polymorphism was ever observed in individuals outside of the HBM pedigree, 297 phenotyped individuals were characterized at the site of the HBM gene. None were heterozygous at the site of the HBM polymorphism. In an unphenotyped control group, none of 64 individuals were observed to be heterozygous at position 582. Taken together, these data prove that the polymorphism observed in the kindred displaying the high bone mass phenotype is strongly correlated with the G-T polymorphism at position 582 of Zmax1 (LRP5). Furthermore, these results coupled with the ASO results described below, establish that the HBM polymorphism genetically segregates with the HBM phenotype, and that both the HBM polymorphism and phenotype are rare in the general population.

[0313] 13. Allele Specific Oligonucleotide (ASO) Analysis

[0314] The amplicon containing the HBM polymorphism was PCR amplified using primers specific for the exon of interest. The appropriate population of individuals was PCR amplified in 96 well microtiter plates as follows. PCR reactions (20 μl ) containing 1×Promega PCR buffer (Cat. # M1883 containing 1.5 mM MgCl₂), 100 mM DNTP, 200 nM PCR primers (1863F: 5′-CCAAGTTCTGAGAAGTCC-3′ and 1864R: 5′-AATACCTGAAACCATACCTG-3′; SEQ ID NOS: 629 and 630 respectively), 1 U AmpliTaq™, and 20 ng of genornic DNA were prepared and amplified under the following PCR conditions: 94° C., 1 minute, (94° C., 30 sec.; 58° C., 30 sec.; 72° C. , 1 min X35 cycles), 72° C., 5 min, 4° C., hold. Loading dye was then added and 10 μl of the products was electrophoresed on 1.5% agarose gels containing 1 μg/ml ethidium bromide at 100-150 V for 5-10 minutes. Gels were treated 20 minutes in denaturing solution (1.5 M NaCl, 0.5 N NaOH), and rinsed briefly with water. Gels were then neutralized in 1 M Tris-HCl, pH 7.5, 1.5 M NaCl, for 20 minutes and rinsed with water. Gels were soaked in 10×SSC for 20 minutes and blotted onto nylon transfer membrane (Hybond N+-Amersham) in 10×SSC overnight. Filters were the rinsed in 6×SSC for 10 minutes and UV crosslinked.

[0315] The allele specific oligonucleotides (ASO) were designed with the polymorphism approximately in the middle. Oligonucleotides were phosphate free at the 5′ end and were purchased from Gibco BRL. Sequences of the oligonucleotides are:

| | |
|---|---|
| 2326 Zmax1.ASO.g: | |
| 5′-AGACTGGGGTGAGACGC-3′ | (SEQ ID NO: 631) |
| 2327 Zmax1.ASO.t: | |
| 5′-CAGACTGGGTTGAGACGCC-3′ | (SEQ ID NO: 632) |

[0316] The polymorphic nucleotides are underlined. To label the oligos, 1.5 μl of 1 μg/μl ASO oligo (2326.Zmax1.ASO.g or 2327.Zmax1.ASO.t), 11 μl ddH₂O, 2 μl 10×kinase forward buffer, 5 μl γ³²P-ATP (6000 Ci/mMole), and 1 μl T4 polynucleotide kinase (10 U/μl) were mixed, and the reaction incubated at 37° C. for 30-60 minutes. Reactions were then placed at 95 ° C. for 2 minutes and 30 ml H₂O was added. The probes were purified using a G25 microspin column (Pharmacia).

[0317] Blots were prehybridized in 10 ml 5×SSPE, 5×Denhardt's, 2% SDS, and 100 μl/ml, denatured, sonicated salmon sperm DNA at 40° C. for 2 hr. The entire reaction mix of kinased oligo was then added to 10 ml fresh hybridization buffer (5×SSPE, 5×Denhardt's, 2% SDS) and hybridized at 40° C. for at least 4 hours to overnight.

[0318] All washes done in 5×SSPE, 0.1% SDS. The first wash was at 45° C. for 15 minutes; the solution was then changed and the filters washed 50° C. for 15 minutes. Filters were then exposed to Kodak biomax film with 2 intensifying screens at −70° C. for 15 minutes to 1 hr. If necessary the filters were washed at 55° C. for 15 minutes and exposed to film again. Filters were stripped by washing in boiling 0.1×SSC, 0.1% SDS for 10 minutes at least 3 times.

[0319] The two films that best captured the allele specific assay with the 2 ASOs were converted into digital images by scanning them into Adobe PhotoShop. These images were overlaid against each other in Graphic Converter and then scored and stored in FileMaker Pro 4.0 (see FIG. 9).

[0320] In order to determine the HBM allele frequency in ethnically diverse populations, 672 random individuals from various ethnic groups were typed by the allele specific oligonucleotide (ASO) method. This population included 96 CEPH grandparents (primarily Caucasian), 192 Caucasian, 192 African-American, 96 Hispanic, and 96 Asian individuals. No evidence was obtained for the presence of the HBM polymorphism in any of these individuals. Overall, a total of 911 individuals were typed either by direct sequencing or ASO hybridization; all were homozygous GG at the, site of the HBM polymorphism (FIG. 14). This information illustrates that the HBM allele is rare in various ethnic populations.

[0321] Thus this invention provides a rapid method of identifying individuals with the HBM allele. This method could be used in the area of diagnostics and screening of an individual for susceptibility to osteoporosis or other bone disorder. The assay could also be used to identify additional individuals with the HBM allele or the additional polymorphisms described herein.

[0322] 14. Cellular Localization of Zmax1 (LRP5)

[0323] 14.1 Gene Expression in Rat Tibia by Non Isotopic in situ Hybridization

[0324] In situ hybridization was conducted by Pathology Associates International (PAI), Frederick, Md. This study was undertaken to determine the specific cell types that express the Zmax1 (LRP5) gene in rat bone with particular emphasis on areas of bone growth and remodeling. Zmax1 (LRP5) probes used in this study were generated from both human (HuZmax1) and mouse (MsZmax1) cDNAs, which share an 87% sequence identity. The homology of human and mouse Zmax1 (LRP5) with rat Zmax1 (LRP5) is unknown.

[0325] For example, gene expression by non-isotopic ill situ hybridization was performed as follows, but other methods would be known to the skilled artisan. Tibias were collected from two 6 to 8 week old female Sprague Dawley rats euthanized by carbon dioxide asphyxiation. Distal ends were removed and proximal tibias were snap frozen in OCT embedding medium with liquid nitrogen immediately following death. Tissues were stored in a −80° C. freezer.

[0326] Probes for amplifying PCR products from cDNA were prepared as follows. The primers to amplify PCR products from a cDNA clone were chosen using published sequences of both human LRP5 (GenBank Accession No. ABO17498) and mouse LRP5 (GenBanlc Accession No. AF064984). In order to minimize cross reactivity with other genes in the LDL receptor family, the PCR products were derived from an intracellular portion of the protein coding region. PCR was performed in a 50 μl reaction volume using cDNA clone as template. PCR reactions contained 1.5 mM MgCl₂, 1 unit AmpliTaq, 200 μM dNTPs and 2 μM each primer. PCR cycling conditions were 94° C. for 1 min., followed by 35 cycles of 94° C. for 30 seconds, 55° C. for 30 seconds, 729C for 30 seconds; followed by a 5 minute extension at 72° C. The reactions were then run on a 1.5% agarose Tris-Acetate gel. DNA was eluted from the agarose, ethanol precipitated and resuspended in 10 mM Tris, pH 8.0. Gel purified PCR products were prepared for both mouse and human cDNAs and supplied to Pathology Associates International for in situ hybridizations.

[0327] The sequence of the human and mouse PCR primers and products were as follows:

| | |
|---|---|
| Human Zmax1 | |
| (LRP5) sense primer (HBM253) | |
| 5′-CCCGTGTGCTCCGCCGCCCAGTTC-3′ | (SEQ ID NO: 633) |
| Human Zmax1 | |
| (LRP5) antisense primer (HBM465) | |
| 5′-GGCTCACGGAGCTCATCATGGACTT-3′ | (SEQ ID NO: 634) |
| Human Zmax1 PCR product | |
| 5′-CCCGTGTGCTCCGCCGCCCAGTTCCCCTGCG | (SEQ ID NO: 635) |
| CGCGGGGTCAGTGTGTGGACCTGCGCCTGCGCTG | |
| CGACGGCGAGGCAGACTGTCAGGACCGCTCAGAC | |
| GAGGTGGACTGTGACGCCATCTGCCTGCCCAACC | |
| AGTTCCGGTGTGCGAGCGGCCAGTGTGTCCTCAT | |
| CAAACAGCAGTGCGACTCCTTCCCCGACTGTATC | |
| GACGGCTCCGACGAGCTCATGTGTGAAATCACCA | |
| AGCCGCCCTCAGACGACAGCCCGGCCCACAGCAG | |
| TGCCATCGGGCCCGTCATTGGCATCATCCTCTCT | |
| CTCTTCGTCATGGGTGGTGTCTATTTTGTGTGCC | |
| AGCGCGTGGTGTGCCAGCGCTATGCGGGGGCCAA | |
| CGGGCCCTTCCCGCACGAGTATGTCAGCGGGACC | |
| CCGCACGTGCCCCTCAATTTCATAGCCCCGGGCG | |
| GTTCCCAGCATGGCCCCTTCACAGGCATCGCATG | |
| CGGAAAGTCCATGATGAGCTCCGTGAGCC-3′ | |
| Mouse Zmax1 (LRP5) | |
| Sense primer (HBM655) | |
| 5′-AGCGAGGCCACCATCCACAGG-3′ | (SEQ ID NO: 636) |
| Mouse Zmax1 (LRP5) | |
| antisense primer (HBM656) | |
| 5′-TCGCTGGTCGGCATAATCAAT-3′ | (SEQ ID NO: 637) |
| Mouse (LRP5) 1 PCR product | |
| 5′-AGCAGAGCCACCATCCACAGGATCTCCCTGG | (SEQ ID NO: 638) |
| AGACTAACAACAACGATGTGGCTATCCCACTCAC | |
| GGGTGTCAAAGAGGCCTCTGCACTGGACTTTGAT | |
| GTGTCCAACAATCACATCTACTGGACTGATGTTA | |
| GCCTCAAGACGATCAGCCGAGCCTTCATGAATGG | |
| GAGCTCAGTGGAGCACGTGATTGAGTTTGGCCTC | |
| GACTACCCTGAAGGAATGGCTGTGGACTGGATGG | |
| GCAAGAACCTCTATTGGGCGGACACAGGGACCAA | |
| CAGGATTGAGGTGGCCCGGCTGGATGGGCAGTTC | |
| CGGCAGGTGCTTGTGTGGAGAGACCTTGACAACC | |
| CCAGGTCTCTGGCTCTGGATCCTACTAAAGGCTA | |
| CATCTACTGGACTGAGTGGGGTGGCAAGCCAAGG | |
| ATTGTGCGGGCCTTCATGGATGGGACCAATTGTA | |
| TGACACTGGTAGACAAGGTGGGCCGGGCCAACGA | |
| CCTCACCATTGATTATGCCGACCAGCGA-3′ | |

[0328] Riboprobes were synthesized as follows. The PCR products were reamplified with chimeric primers designed to incorporate either a T3 promoter upstream, or a T7 promoter downstream of the reamplification products. The resulting PCR products were used as template to synthesize digoxigenin-labeled riboprobes by in vitro transcription (TVT). Antisense and sense riboprobes were synthesized using T7 and T3 RNA polymerases, respectively, in the presence of digoxigenin-11-UTP (Boehringer-Mannheim) using a MAXIscript IVT kit (Ambion) according to the manufacturer. The DNA was then degraded with Dnase-1, and unincorporated digoxigenin was removed by ultrafiltration. Riboprobe integrity was assessed by electrophoresis through a denaturing polyacrylamide gel. Molecular size was compared with the electrophoretic mobility of a 100-1000 base pair (bp) RNA ladder (Ambion). Probe yield and labeling was evaluated by blot immunochemistry. Riboprobes were stored in 5 μl aliquots at −80° C.

[0329] The in situ hybridization was performed as follows. Frozen rat bone was cut into 5 μM sections on a Jung CM3000 cryostat (Leica) and mounted on adhesive slides (Instrumedics). Sections were kept in the cryostat at −20° C. until all the slides were prepared in order to prevent MRNA degradation prior to post-fixation for 15 minutes in 4% paraformaldehyde. Following post-fixation, sections were incubated with 1 ng/μl of either antisense or sense riboprobe in Pathology Associates International (PAI) customized hybridization buffer for approximately 40 hours at 58° C. Following hybridization, slides were subjected to a series of post-hybridization stringency washes to reduce nonspecific probe binding. Hybridization was visualized by immunohistochemistry with an anti-digoxigenin antibody (FAB fragment) conjugated to alkaline phosphatase. Nitroblue tetrazolium chloride/bromochloroindolyl phosphate (Boehringer-Mannheim), a precipitating alkaline phosphatase substrate, was used as the chromogen to stain hybridizing cells purple to nearly black, depending on the degree of staining. Tissue sections were counter-stained with nuclear fast red. Assay controls included omission of the probe, omission of probe and anti-digoxigenin antibody.

[0330] Specific cell types were assessed for demonstration of hybridization with antisense probes by visualizing a purple to black cytoplasmic and/or peri-nuclear staining indicating a positive hybridization signal for mRNA. Each cell type was compared to the replicate sections, which were hybridized with the respective sense probe. Results were considered positive if staining was observed with the antisense probe and no staining or weak background with the sense probe.

[0331] The cellular localization of the hybridization signal for each of the study probes is summarized in Table 9. Hybridization for Zmax1 (LRP5) was primarily detected in areas of bone involved in remodeling, including the endosteum and trabecular bone within the metaphysis. Hybridization in selected bone lining cells of the periosteum and epiphysis were also observed. Positive signal was also noted in chondrocytes within the growth plate, particularly in the proliferating chondrocytes. See FIGS. 10, 11 and 12 for representative photomicrographs of in situ hybridization results.

TABLE 9
Summary of Zmax1 (LRP5) in situ hybridization in rat tibia

| PROBE | SITE | ISH SIGNAL |
|---|---|---|
| Hu Zmax1 | Epiphysis | |
| | Osteoblasts | + |
| | Osteoclasts | − |
| | Growth Plate | |
| | resting chondrocytes | − |
| | proliferating chondrocytes | + |
| | hypertrophic chondrocytes | − |
| | Metaphysis | |
| | osteoblasts | + |
| | osteoclasts | + |
| | Diaphysis | − |
| | Endosteum | |
| | osteoblasts | + |
| | osteoclasts | + |
| | Periosteum | − |
| MsZmax1 | Epiphysis | |
| | Osteoblasts | + |
| | Osteoclasts | − |
| | Growth Plate | |
| | resting chondrocytes | − |
| | proliferating chondrocytes | + |
| | hypertrophic chondrocytes | + |
| | Metaphysis | |
| | osteoblasts | + |
| | osteoclasts | + |
| | Diaphysis | − |
| | Endosteum | |
| | osteoblasts | + |
| | osteoclasts | + |
| | Periosteum | + |

Legend:
“+” = hybridization signal detected
”−” = no hybridization signal detected
“ISH”—In situ hybridization

[0332] These studies confirm the positional expression of Zmax1 (LRP5) in cells involved in bone remodeling and bone formation. Zmax1 (LRP5) expression in the zone of proliferation and in the osteoblasts and osteoclasts of the proximal metaphysis, suggests that the Zmax1 (LRP5) gene is involved in the process of bone growth and mineralization. The activity and differentiation of osteoblasts and osteoclasts are closely coordinated during development as bone is formed and during growth as well as in adult life as bone undergoes continuous remodeling. The formation of internal bone structures and bone remodeling result from the coupling of bone resorption by activated osteoclasts with subsequent deposition of new material by osteoblasts. Zmax1 (LRP5) is related to the LDL receptor gene, and thus may be a receptor involved in mechanosensationl and subsequent signaling in the process of bone remodeling. Therefore, changes in the level of expression of this gene could impact on the rate of remodeling and degree of mineralization of bone.

[0333] 15. Antisense

[0334] Antisense oligonucleotides are short synthetic nucleic acids that contain complementary base sequences to a targeted RNA. Hybridization of the RNA in living cells with the antisense oligonucleotide interferes with RNA function and ultimately blocks protein expression. Therefore, any gene for which the partial sequence is known can be targeted by an antisense oligonucleotide.

[0335] Antisense technology is becoming a widely used research tool and will play an increasingly important role in the validation and elucidation of therapeutic targets identified by genomic sequencing efforts.

[0336] Antisense technology was developed to inhibit gene expression by utilizing an oligonucleotide complementary to the mRNA that encodes the target gene. There are several possible mechanisms for the inhibitory effects of antisense oligonucleotides. Among them, degradation of mRNA by RNase H is considered to be the major mechanism of inhibition of protein function. This technique was originally used to elucidate the function of a target gene, but may also have therapeutic applications, provided it is designed carefully and properly.

[0337] An antisense oligonucleotide can be, for example, about 5, 10, 15, 20, 25, 30, 35, 40, 45 or 50 nucleotides in length. An antisense nucleic acid of the invention can be constructed using chemical synthesis and enzymatic ligation reactions using procedures known in the art. For example, an antisense nucleic acid (e.g., an antisense oligonucleotide) can be chemically synthesized using naturally occurring nucleotides or variously modified nucleotides designed to increase the biological stability of the molecules or to increase the physical stability of the duplex formed between the antisense and sense nucleic acids, e.g., phosphorothioate derivatives and acridine substituted nucleotides can be used. Examples of modified nucleotides which can be used to generate the antisense nucleic acid include 5-fluorouracil, 5-bromouracil, 5-chlorouracil, 5-iodouracil, hypoxanthine, xanthine, 4-acetylcytosine, 5-(carboxyhydroxylmethyl)uracil, 5-carboxyrnethylaminomethyl-2-thiouridine, 5-carboxymethlaniinomethyluracil, dihydrouracil, P-D-galactosylqueosine, inosine, N6-isopentenyladenine, I-methylguanine, I-methylinosine, 2,2-dimethylguanine, 2-methyladenine, 2-methylguanine, 3-methylcytosine, 5-methylcytosine, N6-adenine, 7-methylguanine, 5-methylaminomethyluracil, 5-methoxyaminomethyl-2-thiouracil, beta-D-mannosylqueosine, 5′-methoxycarboxymethyluracil, 5-methoxyuracil, 2-methylthio-N6-isopentenyladenine, uracil-5-oxyacetic acid (v), wybutoxosine, pseudouracil, queosine, 2-thiocytosine, 5-methyl-2-thiouracil, 2-thiouracil, 4-thiouracil, 5-methyluracil, uracil-5-oxyacetic acid methylester, uracil-5-oxyacetic acid (v), t-methyl-2-thiouracil, 3-(3-amino-3-N-2-carboxypropyl)uracil, (acp3)w, and 2,6-diaminopurine.

[0338] In addition, the use of morpholino oligonucleotides could be employed. Morpholinos are oligomers with modification of the ribose moiety to a morpholino group. This technology is covered by U.S. Pat. No. 5,185,444 and is described in Summerton et al., 1997 Antisense Nucleic Acid Ding Dev. 7(3): 187-95. The antisense nucleic acid molecules of the invention are typically administered to a subject or generated in situ such that they hybridize with or bind to cellular mRNA and/or genomic DNA encoding an HBM or Zmax1 (LRP5) protein or a protein which interacts with Zmax1 (LRP5) and/or HBM to thereby inhibit expression of the protein, e.g., by inhibiting transcription and/or translation. The hybridization can be by conventional nucleotide complementary to form a stable duplex, or, for example, in the case of an antisense nucleic acid molecule which binds to DNA duplexes, through specific interactions in the major groove of the double helix. An example of a route of administration of an antisense nucleic acid molecule of the invention includes direct injection at a tissue site. Alternatively, an antisense nucleic acid molecule can be modified to target selected cells and then administered systemically. For example, for systemic administration, an antisense molecule can be modified such that it specifically binds to a receptor or an antigen expressed on a selected cell surface, e.g., by linking the antisense nucleic acid molecule to a peptide or an antibody which binds to a cell surface receptor or antigen. The antisense nucleic acid molecule can also be delivered to cells using the vectors described herein.

[0339] In yet another embodiment, the antisense nucleic acid molecule of the invention is an α-anomeric nucleic acid molecule. An μ-anomeric nucleic acid molecule forms specific double-stranded hybrids with complementary RNA in which, contrary to the usual γ-units, the strands run parallel to each other (Gaultier et al., 1987 Nucl. Acids Res. 15: 6625-41). The antisense nucleic acid molecule can also comprise a 2′-o-methylribonucleotide (Inoue et al., 1987 Nucl. Acids Res. 15: 6131-6148) or a chimeric RNA-DNA analogue (Inoue et al., 1987 FEBS Lett. 215: 327-330). In still another embodiment, an antisense nucleic acid of the invention is a ribozyme. Ribozymes are catalytic RNA molecules with ribonuclease activity which are capable of cleaving a single-stranded nucleic acid, such as an MRNA, to which they have a complementary region. Thus, ribozymes (e.g., hammerhead ribozymes (described in Haselhoff et al. 1988 Nature 334: 585-591) can be used to catalytically cleave Zmax1 (LRP5) or BM mRNA transcripts to thereby inhibit translation of Zmax1 (LRP5) or HBM mRNA. A ribozyme having specificity for a Zmax1- or HBM-encoding nucleic acid can be designed based upon the nucleotide sequence of a Zmax1 (LRP5) or HBM cDNA disclosed herein (i.e., SEQ ID NOS:1 or 3). For example, a derivative of a Tetraliymena L-19 IVS RNA can be constructed in which the nucleotide sequence of the active site is complementary to the nucleotide sequence to be cleaved in an HBM or Zmax1-encoding mRNA. See, e.g., Cech et al. U.S. Pat. No. 4,987,071 and Cech et al. U.S. Pat. No. 5,116,742 both incorporated herein by reference. Alternatively, Zmax1 (LRP5) or HBM mRNA can be used to select a catalytic RNA having a specific ribonuclease activity from a pool of RNA molecules. See, e.g., Bartel et al., 1993 Science 261: 1411-1418. Alternatively, Zinax1 (LRP5) or HBM gene expression can be inhibited by targeting nucleotide sequences complementary to the regulatory region of the Zmax1 (LRP5)or HBM gene (e.g., the Zmax1 or HBM gene promoter and/or enhancers) to form triple helical structures that prevent transcription of the Zmax1 (LRP5) or HBM genes in target cells. See generally, Helene, 1991 Anticancer Drug Des. 6(6):569-84; Helene et al., 1992 Ann. N.Y. Acad. Sci. 660:27-36; and Maher, 1992 Bioassays 14(12):807-15.

[0340] Zmax1 (LRP5), LRP6, HBM-like and HBM gene expression can also be inhibited using RNA interference (RNAi) caused by small inhibitory RNAs (siRNAs). This is a technique for post-transcriptional gene silencing (PTGS), in which target gene activity is specifically abolished with cognate double-stranded RNA (dsRNA). siRNAs resemble in many aspects PTGS in plants and has been detected in many invertebrates including trypanosome, hydra, planaria, nematode and fruit fly (Drosophila melanogaster). It may be involved in the modulation of transposable element mobilization and antiviral state formation. RNAi in mammalian systems is disclosed in PCT application WO 00/63364 which is incorporated by reference herein in its entirety. See also, Elbashir et al., 2001 Nature 411: 494-98. Basically, dsRNA, homologous to the target (Zmax1 or HBM) is introduced into the cell and a sequence specific reduction in gene activity is observed.

[0341] Another embodiment contemplates the use of small hairpin RNAs (shRNAs). These compounds are described further in Yu et al., 2002 Proc. Natl. Acad. Sci. USA 99: 6047-52; and Paddison et al., 2002 Genes & Devel. 16: 948-58.

[0342] As an example, preparing antisense oligonucleotides can be performed as follows. Studies have been undertaken using antisense technology in the osteoblast-like murine cell line, MC3T3. These cells can be triggered to develop along the bone differentiation sequence. An initial proliferation period is characterized by minimal expression of differentiation markers and initial synthesis of collagenous extracellular matrix. Collagen matrix synthesis is required for subsequent induction of differentiation markers. Once the matrix synthesis begins, osteoblast marker genes are activated in a clear temporal sequence: alkaline phosphatase is induced at early times while bone sialoprotein and osteocalcin appear later in the differentiation process. This temporal sequence of gene expression is useful in monitoring the maturation and mineralization process. Matrix mineralization, which does not begin until several days after maturation has started, involves deposition of mineral on and within collagen fibrils deep within the matrix near the cell layer-culture plate interface. The collagen fibril-associated mineral formed by cultured osteoblasts resembles that found in woven bone in vivo and therefore is used frequently as a study reagent.

[0343] MC3T3 cells were transfected with antisense oligonucleotides for the first week of the differentiation, according to the manufacturer's specifications (U.S. Pat. No. 5,849,902).

[0344] The oligonucleotides designed for Zmax1 (LRP5) are given below:

| | |
|---|---|
| 10875: | |
| 5′-AGUACAGCUUCUUGCCAACCCAGUC-3′ | (SEQ ID NO: 639) |
| 10876: | |
| 5′-UCCUCCAGGUCGAUGGUCAGCCCAU-3′ | (SEQ ID NO: 640) |
| 10877: | |
| 5′-GUCUGAGUCCGAGUUCAAAUCCAGG-3′ | (SEQ ID NO: 641) |

[0345] FIG. 13 shows the results of antisense inhibition of (LRP5) 1 in MC3T3 cells. The three oligonucleotides shown above were transfected into MC3T3 and RNA was isolated according to standard procedures. Northern analysis clearly shows markedly lower steady state levels of the Zmax1 (LRP5) transcript while the control gene GAPDH remained unchanged. Thus, antisense technology using the primers described above allows for the study of the role of Zmax1 (LRP5) expression on bone biology.

[0346] 16. Yeast Two Hybrid

[0347] In order to identify the signaling pathway that Zmax1 (LRP5) participates in to modulate bone density, the yeast two hybrid protein interaction technology was utilized. This technique facilitates the identification of proteins that interact with one another by coupling tester proteins to components of a yeast transcription system (Fields et al., 1989 Nature 340: 245-246; U.S. Pat. No. 5,283,173 by Fields et al.; Johnston, 1987 Microbiol. Rev. 51: 458-476; Keegan et al., 1986 Science 231: 699-704; Durfee et al., 1993, Genes Dev. 7: 555-569; Chien et al., 1991 Proc. Natl. Acad. Sci USA 88: 9578-9582; Fields et al., 1994 Triends in Genetics 10: 286-292; and Gyuris et al., 1993 Cell 75: 791-803). First a “bait” protein, the protein for which one seeks interacting proteins, is fused to the DNA binding domain of a yeast transcription factor. Second, a cDNA library is constructed that contains cDNAs fused to the transcriptional activation domain of the same yeast transcription factor; this is termed the prey library. The bait construct and prey library are transformed into yeast cells and then mated to produce diploid cells. If the bait interacts with a specific prey from the cDNA library, the activation domain is brought into the vicinity of the promoter via this interaction. Transcription is then driven through selectable marker genes and growth on selective media indicates the presence of interacting proteins.

[0348] The amino acid sequence used in the yeast two hybrid experiments discussed herein consisted of the entire cytoplasmic domain and a portion of the transmembrane domain and is shown below (amino to carboxy orientation):

| | |
|---|---|
| RVVCQRYAGA NGPFPHEYVS GTPHVPLNFI | (SEQ ID NO: 765) |
| APGGSQHGPF TGIACGKSMM SSVSLMGGRG | |
| GVPLYDRNHV TGASSSSSSS TKATLYPPIL | |
| NPPPSPATDP SLYNMDMFYS SNIPATVRPY | |
| RPYIIRGMAP PTTPCSTDVC DSDYSASRWK | |
| ASKYYLDLNS DSDPYPPPPT PHSQYLSAED | |
| SCPPSPATER SYFHLFPPPP SPCTDSS | |

[0349] The last 6 amino acids of the putative transmembrane domain are indicated in bold. Putative SH3 domains are underlined. Additional amino acid sequences of 50 amino acids or greater in either the proteins encoded by the Zmax1 (LRP5) or HBM alleles can also be used as bait. The upper size of the polypeptide used as bait is limited only by the presence of a complete transmembrane domain (see FIG. 4), which will render the bait to be nonfunctional in a yeast two hybrid system. These additional bait proteins can be used to identify additional proteins which interact with the proteins encoded by HBM or Zmax1 (LRP5) in the focal adhesion signaling pathway or in other pathways in which these HBM or Zmax1 (LRP5) proteins may act. Once identified, methods of identifying agents which regulate the proteins in the focal adhesion signaling pathway or other pathways in which HBM acts can be performed as described herein for the HBM and Zmax1 (LRP5) proteins.

[0350] In order to identify cytoplasmic Zmax1 (LRP5) signaling pathways, the cytoplasmic domain of Zmax1 (LRP5) was subcloned into two bait vectors. The first vector was pDBleu, which was used to screen a brain, and Hela prey cDNA library cloned into the vector pPC86 (Clontech). The second bait vector used was pDBtrp, which was used to screen a cDNA prey library derived from the TE85 osteosarcoma cell line in vector pOP46. Another suitable vector which is widely available, is p86 (Gibco, iest™ System). Standard techniques known to those skilled in the art were used as described in Fields and Song, 1989 Nature 340: 245-246; U.S. Pat. No. 5,283,173 by Fields and Son; Johnston, 1987 Microbiol. Rev,. 51: 458-476; Keegan et al., 1986 Scienice 231: 699-704; Durfee et al., 1993 Genes Dev. 7: 555-569; Chien et al., 1991 Proc. Natl. Acad. Sci USA 88: 9578-9582; Fields et al., 1994 Trends in Genetics 10: 286-292; and Gyuris et al., 1993 Cell 75i: 791-803. The bait construct and prey cDNA libraries were transformed into yeast using standard procedures.

[0351] To perform the protein interaction screen, an overnight culture of the bait yeast strain was grown in 20 ml SD selective medium with 2% glucose (pDBLeu, SD -Leu medium, pDBtrp, SD-trp medium). The cultures were shaken vigorouslyat 30° C. overnight. The cultures were diluted 1:10 with complete medium (YEPD with 2% glucose) and the cultures then incubated with shaking for 2 hrs at 30° C.

[0352] The frozen prey library, was thawed, and the yeast cells reactivated by growing them in 150 ml YEPD medium with 2% glucose for 2 hrs at 30° C. A filter unit was sterilized with, 70% ethanol and washed with sterile water to remove the ethanol. The cell densities of both bait and prey cultures were measured by determining the OD at 600 nm. An appropriate volume of yeast cells that corresponded to a cell number of 1 ml of OD 600=4 of each yeast strain, bait and prey (library*) was placed in a 50 ml Falcon tube. The mixture was then filtered through the sterilized filter unit. The filter was then transferred onto a prewarmed YEPD agar plate with the cell side up, removing all air bubbles underneath the filter. Plates were then incubated at 30° C. for 6 hrs. One filter was transferred into a 50 ml Falcon tube, and 10 ml of SD with 2% Glucose was added; cells were resuspended by vortexing for 10 sec.

[0353] The number of primary diploid cells (growth on SD-Leu, -Trp plates) versus the numbers of colony forming units growing on SD-Trp and SD-Leu plates only was then titered. Different dilutions were plated and incubated at 30° C. for two days. The number of colony forming units was then counted. The number of diploid colonies (colonies on SD-Leu-Trp plates) permits the calculation of whether or not the whole library of prey constructs was mated to the yeast expressing the bait. This information is important to judge the quality of the screen.

[0354] 16.1 Indirect Selection

[0355] Resuspended cells from 5 filter-matings were then pooled and the cells sedimented by centrifugation in a 50 ml Falcon tube. Cells were then resuspended in 16 ml SD medium with 2% Glc. Two ml of this cell suspension was plated onto 8 square plates each (SD-Leu, -Trp) with sterile glass beads and selected for diploid cells by incubating at 30° C. for 18-20 hrs.

[0356] Cells were then scraped off the square plates, the cells centrifuged and combined into one 50 ml Falcon tube. The cell pellet was then resuspended in 25 ml of SD medium with 2% glucose. The cell number was then determined by counting of an appropriate dilution (usually 1:100 to 1:1000) with a Neugebauer chamber. Approximately 5×10⁷ diploid cells were plated onto the selective medium. The observations about the growth of the bait strain together with irrelevant prey vectors helps to determine which selective plates will have to be chosen for the library screen. Generally, all screens were plated on one square plate each with SD-Leu, -Trp, -His; SD -Leu, -Trp, His, 5 mM 3AT, and SD-Leu, -Trp, -His, -Ade is recommended.

[0357] The yeast cells were then spread homogeneously with sterile glass beads and incubated at 30° C. for 4 days. The number of colony forming yeast cells was titered by plating different dilutions of the scraped cell suspension onto SD-Leu, -Trp plates. Usually, plating of 100 μl of a 10⁻³ and 10⁻⁴ dilution gave 100-1000 colonies per plate.

[0358] 16.2 Direct Selection

[0359] Five filters with the mated yeast cells were each transferred into separate 50 ml Falcon tubes and the cells resuspended with 10 ml SD medium with 2% Glc, each, followed by vortexing for 10 sec. The resuspended cells were combined and centrifuged in a Beckman centrifuge at 3000 rpm. The supernatant was discarded and the cells resuspended in 6 ml of SD medium with 2% Glc. Two ml of the suspension was spread onto each selective square plate and incubated at 30° C. for 4-5 days.

[0360] 16.3 Isolation of Single Colonies

[0361] Yeast cells from an isolated colony were picked with a sterile tooth pick and transferred into individual wells of a 96 well plate. The cells were resuspended in 50 μl of SD -Leu, -Trp, -His medium and incubated at 30° C. for one day. The yeast cells were then stamped onto a SD-Leu, -Trp, -His plate in 96 well format and incubated at 30° C. for 2 days. Yeast cells were also stamped onto a Nylon filter covering a YEPD plate and incubated at 30° C. for one day. The cells on the Nylon filter were used for the analysis of the β-Gal reporter activity.

[0362] Yeast colonies were scraped from the SD-Leu, -Trp, -His plate with a sterile tooth pick, and reconfigured, if necessary, according to the β-Gal activity and then resuspended in 20% glycerol. This served as a master plate for storage at −80° C.

[0363] For DNA preparation, yeast cells from the glycerol stock were stamped onto a SD-Trp plate and incubated at 30° C. for 2 days. After two days of incubation, the yeast colonies were ready for colony PCR and sequencing. Standard colony PCR conditions were used to amplify inserts from preys recovered from the interaction screen. Sequencing was done using standard sequencing reactions and ABI377 (Perkin Elmer) fluorescent sequencing machines.

[0364] 16.4 Verification of Bait/Prey Interaction

[0365] Glycerol stocks of the prey of interest were thawed and inoculated in a 10 ml overnight culture of SD with glucose -Trp. After overnight growth, plasmid DNA preparation was performed using the BIO 101 RPM Yeast Plasmid Isolation Kit with 10 ml of culture. The culture was centrifuged and transferred to a 1.5 ml microcentrifuge tube. Yeast Lysis Matrix was then added to the pellet followed by 250 μl of Alkaline Lysis Solution. Samples were then vortexed for 5 minutes. 250 μl Neutralizing Solution was added and the sample mixed briefly. Samples were centrifuged for 2 minutes at room temperature in a microcentrifuge. The supernatant was transferred to a Spin Filter avoiding debris and Lysis Matrix. 250 μl of Glassrmilk Spin Buffer was added, and the tubes inverted to mix. Samples were centrifuged for 1 min and the liquid in the Catch Tube was discarded. 500 μl of Wash Solution was added, the samples were centrifuged for 1 min, and the wash solution was discarded. The wash step was repeated once followed by a 1 min dry centrifugation to drive the remaining liquid out of the Spin Filter. The filter was transferred to a new Catch Tube and 100 μl of sterile H₂O was added; samples were then vortexed briefly to resuspend and centrifuged for 30 seconds to collect the DNA in the bottom of the Catch Tube.

[0366] Five μl of DNA was then transformed into DH10B Electromax cells using standard procedures and glycerol stocks prepared. Miniprep DNA was prepared using the Qiagen QIAprep Spin Miniprep Kit. DNA was finally eluted with 30 μl of Qiagen EB buffer. One μl of the plasmid DNA samples was then used to transform yeast cells using standard procedures. After 2 days of growth on SD-trp media, colonies were picked and patched onto fresh media. Similarly, bait colonies were patched onto SD-Leu media. Both were grown overnight at 30° C.

[0367] For mating, cells from bait and prey patches were spread together on YAPD media and incubated at 30° C. for 12 hr. This plate was then replica plated onto an SD Agar-Leu-Trp plate and grown for 2 days at 30° C. To test the strength of interaction these plates were replica plated onto SD Agar-Leu-Trp-His, SD Agar-Leu-Trp-His with 5 mM 3AT and 10 mM 3AT, SD Agar-Leu-Trp-His-Ade, and SD Agar-Leu-Trp-Ura media and grown for 2 days at 30° C.

[0368] 16.5 Galacton Star D-Galactosidase Activity Assay

[0369] After streaking and replica plating positive interactors on selection plates, colonies were placed in a 96 well dish with 200 μl of SD-medium, leaving wells 1 and 96 blank. Ten microliters from the first 96 well dish was plated into another flat bottom 96 well dish containing 100 μl of SD-medium. Controls consisted of a negative control and a very weak positive control. The cell density was measured at OD₆₀₀ (a value of 1 corresponds to 1×10⁷ cells utilizing a 96 well spectrophotometer). The OD was usually between 0.03 and 0.10. Using microplates specifically for the luminometer, 50 μl of reaction mixture were pipetted into each well. Fifty microliters of culture were then added and mixed by pipetting up and down twice. The reaction was incubated for 30 minutes at room temperature followed by measurement of Relative Light Units using a luminometer.

[0370] Table 9 lists the genes identified in the yeast two hybrid screens from the 3 prey libraries tested. Two genes, zyxin and axin, were found to interact with the cytoplasmic domain of (LRP5) 1 in all three screens. Three genes, alpha-actinin, TCB and SI-5 interacted in two of the three screens.

[0371] A variety of proteins found at sites of cell-cell and cell-matrix contact (focal contacts/adesion plaques) were shown to interact with the cytoplasmic domain of Zmax1 (LRP5). These include α-actinin, Trio, Pinch-like protein, and Zyxin. PINCH is a LIM domain-containing protein that is known to interact with integrin-linked kinase, an early signaler in integrin and growth factor signaling pathways. The finding of a closely related gene in the yeast two hybrid screen raises the possibility of a novel pathway linked to integrin signaling from extracellular matrix signals. Trio, also known to localize to focal adhesions, is thought to play a key role in coordinating cell-matrix interactions and cytoskeletal rearrangements involved in cell movement. Zyxin, another LIM domain-containing protein, is also localized to adhesion plaques and is thought to be involved in reorganization of the cytoskeleton when triggers are transmitted via integrin signaling pathways. Zyxin also interacts with alpha actinin, which we identified as interacting with Zmax1 (LRP5). Other LIM domain containing proteins identified include the human homologue of mouse ajuba, LIMD1, and a novel LIMD1-like protein.

[0372] Axin was also identified from the two hybrid experiments. This protein is involved in inhibition of the Wnt signaling pathway and interacts with the tumor suppressor APC. There is a link here with the focal adhesion signaling described above: one common step in the two pathways involves inhibition of glycogen synthase kinase 3, which in turn results in the activation of β-catenin/Lef-1 and AP-1 transcription factors. Axin/APC are involved in this as well as integrin linked kinase. The Wnt pathway has a role in determining cell fates during embryogenesis. If inappropriately activated, the Wnt pathway may also lead to cancer. The Wnt pathway also seems to have a role in cytoskeletal rearrangements. In a Xenopus embryo assay, the combination of HBM and Wnt5a proteins stimulated the Wnt pathway to a much greater extent than the combination of Zmax1 (LRP5) and Wnt5a, which was modestly above the control and Wnt5a alone scores. The HBM and Zmax1 (LRP5) extracellular domains (ECD) caused a modest stimulation of Wnt signaling in the absence of Wnt5a which was slightly increased by the presence of Wnt5a in the presence of HBM ECD. A model depicting Zmax1 (LRP5) involvement in focal adhesion signaling is depicted in FIG. 15.

[0373] This data coupled with other studies suggest that integrin signaling pathways have a role in cellular responses to mechanical stress and adhesion. This provides an attractive model for the mechanism of action of Zmax1 (LRP5) in bone biology. It is possible that Zmax1 (LRP5) is involved in sensing either mechanical stress directly or binding a molecule in the extracellular matrix that is related to mechanical sensation. Signaling through subsequent pathways may be involved in bone remodeling due to effects on cell morphology, cell adhesion, migration, proliferation, differentiation, and apoptosis in bone cells.

TABLE 10
Yeast Two Hybrid Results

| | | | NT | AA |
|---|---|---|---|---|
| | | | SEQ | SEQ |
| Gene | | Genbank | ID | ID |
| Symbol | Gene | Accession # | NO: | NO: |
| ACTN1 | alpha-actinin | NM_001102 | 642 | |
| AES | amino-terminal enhancer of | NM_001130.3 | 643 | |
| AIP4 | atrophin-1 interacting | AF038564.1 | 644 | |
| | protein | | | |
| Novel | Ajuba | | 645 | |
| AXIN | Wnt signaling | AF009674.1 | 646 | |
| CDC23 | cell division cycle 23, | NM_004661.1 | 647 | |
| | yeast, homolog | | | |
| HSM800944 | Similar to TRIO | AL117435.1 | 748 | |
| HSM800936 | | AL117427.1 | 649 | |
| Novel | Similar to LIM domains | | 650 | |
| | containing protein 1 | | | |
| DEEPEST | mitotic spindle coiled-coil | NM_006461.1 | 651 | |
| | related protein | | | |
| ECM1 | extracellular matrix | U65932.1 | 652 | |
| | protein 1 | | | |
| EF1A | elongation factor 1-alpha | X16869.1 | 653 | |
| FN | fibronectin | X02761.1 | 654 | |
| HOXB13 | homeodomain protein | U81599.1 | 655 | |
| Novel | Glu-Lys Rich protein | | 656 | |
| LIMD1 | LIM domains containing 1 | NM_014240.1 | 657 | |
| Novel | PINCH-like | | 658 | |
| RANBPM | centrosomal protein | NM_005493.1 | 659 | |
| S1-5 | extracellular protein | U03877.1 | 660 | |
| TCB | gene encoding cytosolic | M26252.1 | 661 | |
| | thyroid hormone-binding | | | |
| TID | tumorous imaginal discs | NM_005147.1 | 662 | |
| ZYX | Zyxin | NM_003461.1 | 663 | |
| TRIO | GTPase | U42390.1 | 664 | |
| HUMPITPB | phosphatidylinositol | D30037.1 | 665 | |
| | transfer protein | | | |
| ACTN1 | alpha-actinin | NP_001093.1 | | 666 |
| AES | amino-terminal enhancer of | NP_001121.2 | | 667 |
| AIP4 | atrophin-1 interacting | AAC04845.1 | | 668 |
| | protein | | | |
| Novel | Ajuba | | | 669 |
| AXIN | Wnt signaling | AAC51624.1 | | 670 |
| CDC23 | cell division cycle 23, yeast | NP_004652.1 | | 671 |
| | homolog | | | |
| Novel | Similar to TRIO | | | 672 |
| | CAB55923.1 | | | |
| Novel | Similar to LIM domains | | | 673 |
| | containing protein 1 | | | |
| DEEPEST | mitotic spindle coiled-coil | NP_006452.1 | | 674 |
| | related protein | | | |
| ECM1 | extracellular matrix | AAB05933.1 | | 675 |
| | protein 1 | | | |
| EF1A | elongation factor 1-alpha | CAA34756.1 | | 676 |
| FN | fibronectin | CAA26536.1 | | 677 |
| Novel | Glu-Lys rich protein | | | 678 |
| HOXB13 | homeodomain protein B13 | AAB39863.1 | | 679 |
| LIMD1 | LIM domains containing 1 | NP_055055.1 | | 680 |
| Novel | PINCH-like | | | 681 |
| RANBPM | centrosomal protein | NP_005484.1 | | 682 |
| S1-5 | extracellular protein | AAA65590.1 | | 683 |
| TCB | cytosolic thyroid hormone- | AAA36672.1 | | 684 |
| | binding protein | | | |
| TID | tumorous imaginal discs | NP_005138.1 | | 685 |
| ZYX | Zyxin | NP_003452.1 | | 686 |
| TRIO | GTPase | AAC34245.1 | | 687 |
| PTDINSTP | phosphatidylinositol | P48739 | | 688 |
| | transfer protein beta | | | |
| | isoform | | | |

[0374] In light of the model depicted in FIG. 15 and the results shown in Table 10, another aspect contemplated by the invention would be to regulate bone density and bone mass disorders by the regulating focal adhesion signaling. The regulation can occur by regulating the DNA, mRNA transcript or protein encoded by any of the members involved in the focal adhesion signaling pathway as identified by the yeast two hybrid system.

[0375] Also contemplated are the novel nucleic acids and proteins identified by the HBM yeast two hybrid system. These include but are not limited to SEQ ID NO: 645 (Ajuba), SEQ ID NO: 651 (a gene similar to a gene encoding LIM domains containing protein 1), SEQ ID NO: 656 (Glu-Lys Rich protein), SEQ ID NO: 658.(PINCH-like gene), SEQ ID NO: 669 (Ajuba protein), SEQ ID NO: 672 (protein similar to TRIO), SEQ ID NO: 673, SEQ ID NO: 678 (Glu-Lys rich protein) and SEQ ID NO: 681 (PINCH-like protein).

[0376] 17. Potential Function

[0377] The protein encoded by Zmax1 (LRP5) and LRP6 are related to the Low Density Lipoprotein receptor (LDL receptor). See, Goldstein et al., 1985 Ann. Rev. Cell Biology, 1: 1-39; Brown et al., 1986 Science, 232:34-47. The LDL receptor is responsible for uptake of low density lipoprotein, a lipid-protein aggregate that includes cholesterol. Individuals with a defect in the LDL receptor are deficient in cholesterol removal and tend to develop artherosclerosis. In addition, cells with a defective LDL receptor show increased production of cholesterol, in part because of altered feedback regulation of cholesterol synthetic enzymes and in part because of increased transcription of the genes for these enzymes. In some cell types, cholesterol is a precursor for the formation of steroid hormones.

[0378] Thus, the LDL receptor may, directly or indirectly, function as a signal transduction protein and may regulate gene expression. Because Zmax1 (LRP5) and LRP6 are related to the LDL receptor, this protein may also be involved in signaling between cells in a way that affects bone remodeling.

[0379] The glycine 171 amino acid is likely to be important for the function of Zmax1 (LRP⁵) because this amino acid is also found in the mouse homologue of Zmax1 (LRP5). The closely related LRP6 (Genbank Accession No. JB0272) protein also contains glycine at the corresponding position (Brown et al., 1988 Biochem. Biophys. Res. Comm. 248: 879-88). Amino acids that are important in a protein's structure or function tend to be conserved between species, because natural selection prevents mutations with altered amino acids at important positions from arising.

[0380] In addition, the extracellular domain of Zmax1 (LRP5) contains four repeats consisting of five YWTD motifs followed by an EFG motif. This 5YWTD+EGF repeat is likely to form a distinct folded protein domain, as this repeat is also found in the LDL receptor and other LDL receptor-related proteins. The first three 5YWTD+EGF repeats are very similar in their structure, while the fourth is highly divergent. Glycine 171 occurs in the central YWTD motif of the first 5YWTD+EGF repeat in Zmax1 (LRP5). The other two similar 5YWTD+EGF repeats of Zmax1 (LRP5) also contain glycine at the corresponding position, as does the 5YWTD+EGF repeat in the LDL receptor protein. However, only 17.6% of the amino acids are identical among the first three 5YWTD+EGF repeats in Zmax1 (LRP5) and the single repeat in the LDL receptor. These observations indicate that glycine 171 is essential to the function of this repeat, and mutation of glycine 171 causes a functional alteration of Zmax1 (LRP5). The cDNA and peptide sequences are shown in FIGS. 6A-6J. The critical base at nucleotide position 582 is indicated in bold and is underlined.

[0381] Northern blot analysis (FIGS. 7A-B) reveals that Zmax1 (LRP5) is expressed in human bone tissue as well as numerous other tissues. A multiple-tissue Northern blot (Clontech, Palo Alto, Calif.) was probed with exons from Zmax1 (LRP5). As shown in FIG. 7A, the 5.5 kb Zmax1 (LRP5) transcript was highly expressed in heart, kidney, lung, liver and pancreas and is expressed at lower levels in skeletal muscle and brain. A second northern blot, shown in FIG. 7B, confirmed the transcript size at 5.5 kb, and indicated that Zmax1 (LRP5) is expressed in bone, bone marrow, calvaria and human osteoblastic cell lines.

[0382] Taken together, these results coupled with the yeast two hybrid results indicate that the KBM polymorphism in the Zmax1 (LRP5) gene is responsible for the HBM phenotype, and that the Zmax1 gene is important in bone development. In addition, because mutation of Zmax1 can alter bone mineralization and development, it is likely that molecules that bind to Zmax1 may usefully alter bone development. Such molecules may include, for example, small molecules, proteins, RNA aptamers, peptide aptamers, and the like.

[0383] 18. Preparation of Nucleic Acids. Vectors, Transformations and Host Cells

[0384] Large amounts of the nucleic acids of the present invention may be produced by replication in a suitable host cell. Natural or synthetic nucleic acid fragments coding for a desired fragment will be incorporated into recombinant nucleic acid constructs, usually DNA constructs, capable of introduction into and replication in a prokaryotic or eukaryotic cell. Usually the nucleic acid constructs will be suitable for replication in a unicellular host, such as yeast or bacteria, but may also be intended for introduction to (with and without integration within the genome) cultured mammalian or plant or other eulcaryotic cell lines. The purification of nucleic acids produced by the methods of the present invention is described, for example, in Sambrook et al., Molecular Cloning. A Laboratory Manual, 2nd Ed. Cold Spring Harbor Laboratory, Cold Spring Harbor, N.Y. (1989) or Ausubel et al., Current Protocols in Molecular Biology, J. Wiley and Sons, NY (1992).

[0385] The nucleic acids of the present invention may also be produced by chemical synthesis, e.g., by the phosphoramidite method described by Beaucage et al., 1981 Tetra. Lett. 22: 1859-62 or the triester method according to Matteucci,et al, 1981 J. Am. Chem. Soc. 103: 3185, and may be performed on commercial, automated oligonucleotide synthesizers. A double-stranded fragment may be obtained from the single-stranded product of chemical synthesis either by synthesizing the complementary strand and annealing the strands together under appropriate conditions or by adding the complementary strand using DNA polymerase with an appropriate primer sequence.

[0386] Nucleic acid constructs prepared for introduction into a prokaryotic or eukaryotic host may comprise a replication system recognized by the host, including the intended nucleic acid fragment encoding the desired protein, and will preferably also include transcription and translational initiation regulatory sequences operably linked to the protein encoding segment. Expression vectors may include, for example, an origin of replication or autonomously replicating sequence (ARS) and expression control sequences, a promoter, an enhancer and necessary processing information sites, such as ribosome-binding sites, RNA splice sites, polyadenylation sites, transcriptional terminator sequences, and mRNA stabilizing sequences. Secretion signals may also be included where appropriate, whether from a native HBM or Zmax1 (LRP5) protein or from other receptors or from secreted proteins of the same or related species, which allow the protein to cross and/or lodge in cell membranes, and thus attain its functional topology, or be secreted from the cell. Such vectors may be prepared by means of standard recombinant techniques well known in the art and discussed, for example, in Sambrook et al., (1989) or Ausubel et al., (1992).

[0387] An appropriate promoter and other necessary vector sequences will be selected so as to be functional in the host, and may include, when appropriate, those naturally associated with Zmax1 (LRP5) or HBM genes. Examples of workable combinations of cell lines and expression vectors are described in Sambrook et al., (1989) or Ausubel et al., (1992). Many useful vectors are known in the art and may be obtained from such vendors as Stratagene, New England BioLabs, Promega Biotech, and others. Promoters such as the trp, lac and phage promoters, tRNA promoters and glycolytic enzyme promoters may be used in prokaryotic hosts. Useful yeast promoters include promoter regions for metallothionein, 3-phosphoglycerate kinase or other glycolytic enzymes such as enolase or glyceraldehyde-3-phosphate dehydrogenase, enzymes responsible for maltose and galactose utilization, and others. Vectors and promoters suitable for use in yeast expression are further described in EP 73,675A. Appropriate non-native mammalian promoters might include the early and late promoters from SV40 (Fiers et al., 1978 Nature 273: 113) or promoters derived from murine Moloney leukemia virus, mouse tumor virus, avian sarcoma viruses, adenovirus H, bovine papilloma virus or polyoma. In addition, the construct may be joined to an amplifiable gene (e.g., DHFR) so that multiple copies of the gene may be made. For appropriate enhancer and other expression control sequences, see also Enhancers and Eukaiyotic Gene Expression, Cold Spring Harbor Press, Cold Spring Harbor, NY (1983).

[0388] While such expression vectors may replicate autonomously, they may also replicate by being inserted into the genome of the host cell, by methods well known in the art.

[0389] Expression and cloning vectors will likely contain a selectable marker, a gene encoding a protein necessary for survival or growth-of a host cell transformed with the vector. The presence of this gene ensures growth of only those host cells which express the inserts. Typical selection genes encode proteins that a) confer resistance to antibiotics or other toxic substances, e.g. ampicillin, neomycin, methotrexate, etc.; b) complement auxotrophic deficiencies, or c) supply critical nutrients not available from complex media, e.g., the gene encoding D-alanine racemase for Bacilli. The choice of the proper selectable marker will depend on the host cell, and appropriate markers for different hosts are well known in the art.

[0390] The vectors containing the nucleic acids of interest can be transcribed in vitro, and the resulting RNA introduced into the host cell by well-known methods, e.g., by injection (see, Kubo et al., FEBS Letts. 241: 119 (1988)), or the vectors can be introduced directly into host cells by methods well known in the art, which vary depending on the type of cellular host, including electroporation; transfection employing calcium chloride, rubidium chloride, calcium phosphate, DEAE-dextran, or other substances; microprojectile bombardment; lipofection; infection (where the vector is an infectious agent, such as a retroviral genome); and other methods. See generally, Sambrook et al., 1989 and Ausubel et al., 1992. The introduction of the nucleic acids into the host cell by any method known in the art, including those described above, will be referred to herein as “transformation.” The cells into which have been introduced nucleic acids described above are meant to also include the progeny of such cells.

[0391] Large quantities of the nucleic acids and proteins of the present invention may be prepared by expressing the Zmax1 (LRP5), LRP6, HBM or HBM-like nucleic acids or portions thereof in vectors or other expression vehicles in compatible prokaryotic or eukaryotic host cells. The most commonly used prokaryotic hosts are strains of Escherichia coli, although other prokaryotes, such as Bacillus subtilis or Pseudolilonas may also be used.

[0392] Mammalian or other eukaryotic host cells, such as those of yeast, filamentous fungi, plant, insect, or amphibian or avian species, may also be useful for production of the proteins of the present invention. Propagation of mammalian cells in culture is per se well known. See, Jakoby and Pastan (eds.), Cell Culture. Methods in Enzymology, volume 58, Academic Press, Inc., Harcourt Brace Jovanovich, N.Y., (1979). Examples of commonly used mammalian host cell lines are VERO and HeLa cells, Chinese hamster ovary (CHO) cells, and WI38, BHK, and COS cell lines, although it will be appreciated by the skilled practitioner that other cell lines may be appropriate, e.g., to provide higher expression desirable glycosylation patterns, or other features.

[0393] Clones are selected by using markers depending on the mode of the vector construction. The marker may be on the same or a different DNA molecule, preferably the same DNA molecule. In prokaryotic hosts, the transformant may be selected, e.g., by resistance to ampicillin, tetracycline or other antibiotics. Production of a particular product based on temperature sensitivity may also serve as an appropriate marker.

[0394] Prokaryotic or eukaryotic cells transformed with the nucleic acids of the present invention will be useful not only for the production of the nucleic acids and proteins of the present invention, but also, for example, in studying the characteristics of Zmax1 (LRP5), LRP6, HBM or HBM-like proteins.

[0395] Antisense nucleic acid sequences are useful in preventing or diminishing the expression of Zmax1 (LRP5), LRP6, HBM or HBM-like molecules, as will be appreciated by one skilled in the art. For example, nucleic acid vectors containing all or a portion of the Zmax1 (LRP5), LRP6, HBM or HBM-like nucleic acid may be placed under the control of a promoter in an antisense orientation and introduced into a cell. Expression of such an antisense construct within a cell will interfere with Zmax1 (LRP5), LRP6, HBM or HBM-like transcription and/or translation and/or replication.

[0396] The probes and primers based on the Zmax1 (LRP5), LRP6, HBM or HBM-like gene sequences disclosed herein are used to identify homologous gene sequences and proteins in other species. The gene sequences and proteins can also be used in the diagnostic/prognostic, therapeutic and drug screening methods described herein for the species from which they have been isolated.

[0397] 19. Protein Expression and Purification

[0398] Expression and purification of the Zmax1 (LRP5), LRP6, HBM or HBM-like proteins of the invention can be performed essentially as outlined below (LRP5, LRP6 and HBM-like proteins are also included when referring only to HBM). To facilitate the cloning, expression and purification of membrane and secreted protein from the HBM gene, a gene expression system, such as the pET System (Novagen), for cloning and expression of recombinant proteins in E. coli was selected. Also, a DNA sequence encoding a peptide tag, the His-Tap, was fused to the 3′ end of DNA sequences of interest to facilitate purification of the recombinant protein products. The 3′ end was selected for fusion to avoid alteration of any 5′ terminal signal sequence.

[0399] Nucleic acids chosen, for example, from the nucleic acids set forth in SEQ ID NOS: 1, 3 and 5-12 for cloning HBM were prepared by polymerase chain reaction (PCR). Synthetic oligonucleotide primers specific for the 5′ and 3′ ends of the HBM nucleotide sequence were designed and purchased from Life Technologies (Gaithersburg, Md.). All forward primers (specific for the 5′ end of the sequence) were designed to include an NcoI cloning site at the 5′ terminus. These primers were designed to permit initiation of protein translation at the methionine residue encoded within the NcoI site followed by a valine residue and the protein encoded by the HBM DNA sequence. All reverse primers (specific for the 3′ end of the sequence) included an EcoRI site at the 5′ terminus to permit cloning of the HBM sequence into the reading frame of the pET-28b. The pET-28b vector provided a sequence encoding an additional 20 carboxyl-terminal amino acids including six histidine residues (at the C-terminus), which comprised the histidine affinity tag.

[0400] Genornic DNA prepared from the HBM gene was used as the source of template DNA for PCR amplification (Ausubel et al., Current Protocols in Molecular Biology, John Wiley & Sons (1994)). To amplify a DNA sequence containing the HBM nucleotide sequence, genomic DNA (50 ng) was introduced into a reaction vial containing 2 mM MgCl₂, 1 μM synthetic oligonucleotide primers (forward and reverse primers) complementary to and flanking a defined HBM, 0.2 mM of each of deoxynucleotide triphosphate, dATP, dGTP, dCTP, dTTP and 2.5 units of heat stable DNA polymerase (AmpliTaq™, Roche Molecular Systems, Inc., Branchburg, N.J.) in a final volume of 100 microliters.

[0401] Upon completion of thermal cycling reactions, each sample of amplified DNA was purified using the Qiaquick Spin PCR purification kit (Qiagen, Gaithersburg, Md.). All amplified DNA samples were subjected to digestion with the restriction endonucleases, e.g., NcoI and EcoRI (New England BioLabs, Beverly, Mass.) (Ausubel et al., Current Protocols in Molecular Biology, John Wiley & Sons, Inc. (1994)). DNA samples were then subjected to electrophoresis on 1.0% NuSeive (FMC BioProducts, Rockland, Md.) agarose gels. DNA was visualized by exposure to ethidium bromide and long wave UV irradiation. DNA contained in slices isolated from the agarose gel was purified using the Bio 101 GeneClean Kit protocol (Bio 101,Vista, Calif.).

[0402] The pET-28b vector was prepared for cloning by digestion with restriction endonucleases, e.g., NcoI and EcoRI (New England BioLabs, Beverly, Mass.) (Ausubel et al., Current Protocols in Molecular Biology, John Wiley & Sons, inc. (1994)). The pET-28a vector, which encodes the histidine affinity tag that can be fused to the 5′ end of an inserted gene, was prepared by digestion with appropriate restriction endonucleases.

[0403] Following digestion, DNA inserts were cloned (Ausubel et al., Current Protocols in Molecular Biology, John Wiley & Sons, Inc. (1994)) into the previously digested pET-28b expression vector. Products of the ligation reaction were then used to transform the BL21 strain of E. coli (Ausubel et al., 1994) as described below.

[0404] Competent bacteria, E. coli strain BL21 or E. coli strain BL21 (DE3), were transformed with recombinant pET expression plasmids carrying the cloned HBM sequence according to standard methods (Ausubel et al., 1994). Briefly, 1 μl of ligation reaction was mixed with 50 μl of electrocompetent cells and subjected to a high voltage pulse, after which samples were incubated in 0.45 ml SOC medium (0.5% yeast extract, 2.0% tryptone, 10 mM NaCl, 2.5 mM KCl, 10 mM MgCl₂, 10 mM MgSO₄ and 20 mM glucose) at 37° C. with shaking for 1 hour. Samples were then spread on LB agar plates containing 25 μg/ml kanamycin sulfate for growth overnight. Transformed colonies of BL21 were then picked and analyzed to evaluate cloned inserts, as described below.

[0405] Individual BL21 clones transformed with recombinant pET-28b HBM nucleotide sequences were analyzed by PCR amplification of the cloned inserts using the same forward and reverse primers specific for the HBM sequences that were used in the original PCR amplification cloning reactions. Successful amplification verifies the integration of the HBM sequence in the expression vector (Ausubel et al., 1994).

[0406] Individual clones of recombinant pET-28b vectors carrying properly cloned HBM nucleotide sequences were picked and incubated in 5 ml of LB broth plus 25 μg/ml. kanamnycin sulfate overnight. The following day plasmid DNA was isolated and purified using the Qiagen plasmid purification protocol (Qiagen Inc., Chatsworth, Calif.).

[0407] The pET vector can be propagated in any E. coli K-12 strain, e.g., HMS174,HB101, JM109, DH5 and the like, for purposes of cloning or plasmid preparation. Hosts for expression include E. coli strains containing a chromosomal copy of the gene for T7 RNA polymerase. These hosts were lysogens of bacteriophage DE3, a lambda derivative that carries the lacI gene, the lacUV5 promoter and the gene for T7 RNA polymerase. T7 RNA polymerase was induced by addition of isopropyl-β-D-thiogalactoside (IPTG), and the T7 RNA polymerase transcribes any target plasmid containing a functional T7 promoter, such as pET-28b, carrying its gene of interest. Strains include, for example, BL21(DE3) (Studier et al., 1990 Meth. Enzymol., 185: 60-89).

[0408] To express the recombinant HBM sequence, 50 ng of plasmid DNA are isolated as described above to transform competent BL21(DE3) bacteria as described above (provided by Novagen as part of the pET expression kit). The lacZ gene (β-galactosidase) is expressed in the pET-System as described for the HBM recombinant constructions. Transformed cells were cultured in SOC medium for 1 hour, and the culture was then plated on LB plates containing 25 μg/ml kanamycin sulfate. The following day, the bacterial colonies were pooled and grown in LB medium containing kanamycin sulfate (25 μg/ml) to an optical density at 600 nM of 0.5 to 1.0 O.D. units, at which point 1 mM IPTG was added to the culture for 3 hours to induce gene expression of the HBM recombinant DNA constructions.

[0409] After induction of gene expression with IPTG, bacteria were collected by centrifugation in a Sorvall RC-3B centrifuge at 3500×g for 15 minutes at 4° C. Pellets were resuspended in 50 ml of cold mM Tris-HCl, pH 8.0, 0.1 M NaCl and 0.1 mM EDTA (STE buffer). Cells were then centrifuged at 2000×g for 20 minutes at 4° C. Wet pellets were weighed and frozen at −80 ° C. until ready for protein purification.

[0410] 19.1 Chinese Hamster Ovary (CHO) Expression System

[0411] Alternatively, HBM and Zmax1 (LRP5) may be expressed in eukaryotic cells. Eukaryotic cells, such as mammalian derived cell lines, are more capable of expressing properly folded proteins containing cystine rich domains such as the EGF and LDLR modules.

[0412] 19.2 Development of Constructs

[0413] HBM and Zmax1 (LRP5) extracellular domain fusions (ECD) to IgG-Fc were prepared. These ECD fusions to the IgG-Fc domain remove the endogenous transmembrane and cytoplasmic portion of the Zmax1 /HBM receptor and should produce a secreted fusion protein. The Fc region is separated from the Zmax1 /HBM ECD by an enterokinase recognition site so that purified Zmax1 or HBM ECD protein can be obtained without the Fc domain present. The vector used for this construct was pHTop, a derivative of pED (Kaufinan et al., 1991 Nuc. Acids Res. 19: 4485-90) in which the majority of the adenomajor late promoter was replaced by six repeats of the tet operator (Gossen et al., 1992 Proc. Natl. Acad. Sci. USA 89: 5547-51). This vector contains the dihydrofolate reductase (dhfr) gene, and when introduced in the cell line CHO/A2 (see description below), functions very efficiently. Clones with high expression can be selected by isolating cells which survive in high methotrexate (MTX) concentrations.

[0414] The CHO expression vector pHTOP-Fc was digested with SalI and NotI. The intervening sequence was purified away from the rest of the vector by electroelution from an acrylamide gel slice. SalI cuts 5′ to the intrinsic honey bee mellitin signal sequence in pHTOP-Fc, and NotI cuts just 5′ to the coding sequence IgG1-Fc. The resulting SalI-NotI pHTOP-Fc vector has the signal sequence removed and the NotI cloning site is amenable to creating a 5′ fusion to IgG-Fc. Full-length Zmax1 (LRP5) in pCMVSPORT6 and full-length HBM in pCMVSPORT6 were digested individually with Xma1 which cuts within the region of the ORF that encodes the signal sequence) and BamHI (that cuts internally in the ORF) to generate a 2286 bp 5′ fragment of Zmax1 and HBM. The mutation which distinguishes Zmax1 from HBM lies on this fragment. Separately, the Zmax1 DNA was digested with BamHI and SacI to isolate an 1800 bp 3′ fragment which is common to both the Zmax1 and the HBM genes. Together, these two fragments constitute the coding sequence for the HBM and Zmax1 extracellular domains, less the coding sequence for the first 6 amino acids of the signal sequence and ending 18 amino acids prior to the end of the extracellular domain, which we estimated from Kyte-Doolittle plots to end at the sequence “SPAHSS” (SEQ ID NO:698).

[0415] A synthetic duplex was designed to recreate the coding sequence of the Zmax1/HBM signal sequence 5′ of the native XmaI site, which included the initiator methionine and Kozak sequence. This duplex was designed to contain SalI (5′) and XmaI (3′) cohesive ends to adapt ends to adapt the gene fragments described above to the pHTOP-Fc vector. This synthetic duplex was constructed from two partially complementary oligonucleotides as given below:

| | |
|---|---|
| 5′-TCGACCACCATGGAGGCAGCGCCGC-3′ | (SEQ ID NO: 699) |
| 3′-GGTGGTACCTCCGTCGCGGCGGGCC-5′ | (SEQ ID NO: 700) |

[0416] A second synthetic duplex was designed to recreate the 3′ coding sequence from a native SacI site to the estimated end of the extracellular domain following the serine in the sequence “. . .SPAHSS”, and to also encode a cloning site to allow in-frame fusion to the downstream IgG-Fc. This duplex was designed to contain SacI (5′) and NotI (3′) cohesive ends to adapt the gene fragments described above to the pHTOP-Fc vector. This synthetic duplex was constructed from two partially complementary oligonucleotides whose sequences are given below:

| | |
|---|---|
| 5′-CATGTGTGAAATCACCAAGCCGCCCTCA | (SEQ ID NO: 701) |
| GACGACAGCCCGGCCCACAGCAGTGGC-3′ | |
| 3′-TCGAGTACACACTTTAGTGGTTCGGCGG | (SEQ ID NO: 702) |
| GAGTCTGCTGTC GGGCCGGGTGTCGTCACC | |
| GCCGG-5′ | |

[0417] The fragments, synthetic duplexes, and vector were ligated together in a single reaction. Separate reactions were performed for Zmax (LRP5) 1 and HBM. The ligation mixtures were used to transform electrocompetent E. coli DH10B cells, and the resulting colonies were screened by radioactive colony hybridization using the common SacI-BamHI 3′ fragment as a probe. Colonies containing plasmids with the Zmax1 or HBM fragment inserted were identified, and plasmids were isolated from multiple candidates and their sequences were verified by DNA sequencing. Verified constructs were then used for transfection into CHO cells.

[0418] 19.2.1 Establishment of CHO Stable Cell Lines

[0419] The CHO/A2 cell line is derived from CHO DUKX B11 (Urlaub et al., 1980 Proc. Natl. Acad. Sci. USA 77: 4216-20) by stably integrating a transcriptional activator (tTA), a fusion protein, between the Tet repressor and the herpes virus VP16 transcriptional domain (Gossen et al.) CHO cell lines expressing extracellular HBM-1.Fc and Zmax1.Fc were established by transfecting (using lipofection) pHTopHBM-1.Fc into CHO/A2 cells and pHTopZmax1.Fc into CHO/A2 cells. Clones were selected using by culturing the cells in 0.02 μM methotrexate. Clones were later amplified step-wise to a final concentration of 0.5 μM methotrexate.

[0420] 19.2.2 Screening of CHO Stable Cell Lines

[0421] Multiple clones were screened by a variety of techniques. Clones were screened by Western blot assay using a (mouse) anti-human IgG.Fc horseradish peroxidase (RP) antibody. The same clones were also metabolically labeled with ³⁵S-Met/Cys) for a 6 hour pulse, or a 15 minute pulse, followed by a 1 hour, 4 hour, or 24 hour chase in media without radiolabeled Met/Cys. Immunoprecipitations were performed on proteins obtained from conditioned media, as well as from cell extracts. Purification is then performed followed by sequencing of the proteins using N-terminal sequencing as known in the art.

[0422] 19.2.3 Fusion Protein Purification

[0423] Zmax1-IgG or HBM-IgG fusion protein can be purified from conditioned media or cell extracts of CHO stable cells. The fusion protein is isolated by affinity binding to protein A (for example using protein A coated beads or columns). The IgG-FC domain can then subsequently be cleaved from the Zmax/HBM1 ECD protein by enterokinase digestion.

[0424] 19.2.4 Potential Uses for Cell Lines and Protein

[0425] Stable cell lines may be used for generation of purified protein for use in ligand hunting, antibody generation, determination of crystal structure, and competitive binding assays.

[0426] A variety of methodologies known in the art can be used to purify the isolated proteins (Coligan et al., Current Protocols in Protein Science, John Wiley & Sons (1995)). For example, the frozen cells can be thawed, resuspended in buffer and ruptured by several passages through a small volume microfluidizer (Model M-110S, Microfluidics International Corp., Newton, Mass.). The resultant homogenate is centrifuged to yield a clear supematant (crude extract) and, following filtration, the crude extract is fractioned over columns. Fractions are monitored by absorbance at OD₂₈₀ nm and peak fractions may be analyzed by SDS-PAGE.

[0427] The concentrations of purified protein preparations are quantified spectrophotometrically using absorbance coefficients calculated from amino acid content (Perkins, 1986 Eur. J. Biochem. 157:169-180). Protein concentrations are also measured by the method of Bradford, 1976 Anal. Biochem. 72: 248-54 and Lowry et al., 1951 J. Biol. Chewn. 193: 265-275 using bovine serum albumin as a standard.

[0428] SDS-polyacrylamide gels of various concentrations were purchased from BioRad (Hercules, Calif.), and stained with Coomassie blue. Molecular weight markers may include rabbit skeletal muscle myosin (200 kDa), E. coli β-galactosidase (116 kDa), rabbit muscle phosphorylase B (97.4 kDa), bovine serum albumin (66.2 kDa), ovalbumin (45 kDa), bovine carbonic anhydrase (31 kDa), soybean trypsin inhibitor (21.5 kDa), egg white lysozyme (14.4 kDa) and bovine aprotinin (6.5 kDa).

[0429] Once a sufficient quantity of the desired protein has been obtained, it may be used for various purposes. A typical use is the production of antibodies specific for binding. These antibodies may be either polyclonal or monoclonal, and may be produced by in vitro or in vivo techniques well known in the art. Monoclonal antibodies to epitopes of any of the peptides identified and isolated as described can be prepared from murine hybridomas (Kohler, 1975 Nature, 256: 495). In summary, a mouse is inoculated with a few micrograms of HBM protein over a period of two weeks. The mouse is then sacrificed. The cells that produce antibodies are then removed from the mouse's spleen. The spleen cells are then fused with polyethylene glycol with mouse myeloma cells. The successfully fused cells are diluted in a microtiter plate and growth of the culture is continued. The amount of antibody per well is measured by immunoassay methods such as ELISA (Engvall, 1980 Meth. Enzymol. 70: 419). Clones producing antibody can be expanded and further propagated to produce HBM antibodies. Other suitable techniques involve in vitro exposure of lymphocytes to the antigenic polypeptides, or alternatively, to selection of libraries of antibodies in phage or similar vectors. See Huse et al., 1989. Science 246: 1275-81. For additional information on antibody production see Davis et al., Basic Methods in Molecular Biology, Elsevier, N.Y., Section 21-2 (1989).

[0430] Additional uses for purified or isolated protein includes use in X-ray crystallography, binding assays, and so forth as described in greater detail infra.

[0431] 19.3 Zmax1, LRP6, and Variant Antibodies

[0432] Polyclonal antibodies were developed to both human Zmax1 (LRP5) (SEQ ID NO:3) and LRP6 (GenBank Accession No. AF074264). Antibodies can similarly be prepared against HBM and HBM like proteins and polypeptides. Peptides from the Zmax1 amino acid sequence were selected as immunogens based on five goals. 1) Maximize differences between Zmax1 and LRP6 amino acid sequences (71% amino acid identity). See FIG. 27. For sequence comparison, typically one sequence acts as a reference sequence, to which test sequences are compared. When using a sequence comparison algorithm, test and reference sequences are input into a computer, subsequence coordinates are designated, if necessary, and sequence algorithm program parameters are designated. The sequence comparison algorithm then calculates the percent sequence identity for the test sequence(s), relative to the reference sequence, based on the designated program parameters. 2) Minimize potential cross reactivity with other known genes by performing sequence alignment and similarity searches. Optimal alignment of sequences for comparison can be conducted, e.g., by the local homology algorithm of Smith et al., 1981 Adv. Appl. Math. 2: 482, by the homology alignment algorithm of Needleman et al., 1970 J. Mol. Biol. 48: 443, by the search for similarity method of Pearson et al., 1988 Proc. Natl. Acad. Sci. USA 85: 2444, by computerized implementations of these algorithms and others in programs contained in the Wisconsin genetics software package, Genetics Computer Group, 585 Science Dr., Madison, Wis., or by visual inspection (see generally Ausubel et al., Current Protocols in Molecular Biology, John Wiley & Sons (1997). Another example of algorithm that is suitable for determining percent sequence identity and sequence similarity is the BLAST algorithm, which is described in Altschul et al., 1990 J. Mol. Biol. 215: 403-10. Software for performing BLAST analyses is publicly available through the National Center for Biotechnology Information. 3) Obtain peptides with the highest antigenicity index as possible as determined by PeptideStructure protein analysis using software programs contained in the Wisconsin Genetics software package, Genetics Computer Group, 575 Science Dr., Madison, Wis. 4) Locating peptides relative to highly homologous domains (e.g., EGF-like domains and LDL receptor repeats) within the gene family and the location relative to the extracellular and cytoplasmic regions of the gene. 5) And, for human Zmax1 specific antibodies, the human amino acid sequence (SEQ ID NO: 3) was compared to the mouse Zmax1 sequence (GenBank Accession No. AF064984) and peptides were selected based on the above criteria in addition to minimizing the sequence similarity between the two species (See FIG. 26).

[0433] Using the same criteria above, LRP6 specific peptides were selected for polyclonal antibody production. Table 11 lists the amino acid sequences that were chosen, the amino acid differences within the peptide between the human and mouse sequences. Al the peptide sequences (ranging from 12-18 amino acids) were provided to Sigma/Genosys (St. Louis, Mo.) for peptide synthesis and subsequent polyclonal antibody production in New Zealand White Rabbits. The IgG fraction from the serum of each immunized rabbit was isolated using Protein G Sepharose (Amersham). Polyclonal antibody generation using these peptides may be done in other species as well, for example, chickens. This is often advantageous when there is a high degree of similarity between the human (reference) and murine/rodent sequence.

TABLE 11

| Amino | | SEQ | H/M* | |
|---|---|---|---|---|
| Acids | Amino Acids | ID NO | Differences | Comments |
| 171-187 | VETPRIERAGMDGSTRK | 703 | 5 | Contains HBM |
| | | | | polymorphism |
| 264-278 | NKRTGGKRKEILSAL | 704 | 3 | Extracellular |
| 290-301 | ERQPFFHTRCEE | 705 | 2 | Adjacent to EGF-I, |
| | | | | extracellular |
| 532-546 | VDGTKRRTLLEDKLP | 706 | 5 | Extracellular |
| 901-915 | DGLNDCMHNNGQCGQ | 707 | 2 | In EGF-III, extracellular |
| 1010-1021 | PFVLTSLSQGQN | 708 | 6 | Extracellular, human |
| | | | | specific |
| 1415-1429 | YAGANGPFPHEYVSG | 709 | 3 | Cytoplasmic |
| 1452-1464 | ACGKSMMSSVSLM | 710 | 5 | Cytoplasmic, human |
| | | | | specific |
| 1556-1573 | RWKASKYYLDLNSDSDPY | 711 | 1 | Cytoplasmic |
| 888-902 | SGWNECASSNGHCSH | 712 | | LRP6 specific |
| 1308-1321 | NGDANCQDKSDEKN | 713 | | LRP6 specific |

*H/M-differences between human and mouse sequences

[0434] Antibodies towards variants of LRP6, HBM and LRP5 are also contemplated. Based on the analysis of the structural model of the LRP5 beta propeller 1 (discussed in more detail in the Examples), interior regions of the propeller were analysed. Since the site-directed mutagenesis experiments had confirmed that modulation of propeller 1, particularly in the interior regions of beta propeller 1, could result in an HBM effect, a strategy was employed to generate antibodies with epitopes specific to these regions. Such antibodies to the wild type LRP5 receptor could serve, for examples, as an HBM mimetic, by altering ligand/receptor interactions, protein-protein interactions, or by modulating Wnt or Dkk activity. Such antibodies could be used as therapies to treat, for example osteoporosis.

[0435] One set of preferred antibodies includes:

| LRP5 | |
|---|---|
| Amino Acids | Sequence |
| 208-223 | KLYWADAKLSFIHRAN |
| 277-291 | ALYSPMDIQVLSQER |
| 61-73 | GLEDAAAVDFQFSKGA |
| 234-247 | EGSLTHPFALTLSG |
| 249-264 | TLYWTDWQTRSIHACN |
| 144-156 | VLFWQDLDQPRAI |
| 194-210 | IYWPNGLTIDLEEQKLY |
| 34-47 | LLLFANRRDVRLVD |
| 75-89 | GAVYWTDVSEEAIKQ |
| 121-135 | KLYWTDSETNRIEVA |

Similar peptides can be used to prepare antibodies based on the LRP6 or HBM structures and the proposed mutations in their propellers. Other antibodies could easily be prepared based on the structural model discussed in the Examples, as would be readily appreciated by the skilled artisan.

[0437] Another series of antibodies could be prepared which target the domains on HBM, LRP5, LRP6 and their variants which interact Dkk. Such antibodies could again serve as HBM mimetics, for example by displacing Dkk binding and thereby could be used as an osteoporosis therapeutic. Preferred peptides for preparing antibodies include but are not limited to:

| LRP5 | |
|---|---|
| Amino Acids | Sequence |
| 969-993 | LILPLHGLRNVKAIDYDPLDKFIYW |
| 989-1013 | KFIYWVDGRQNIKRAKDDGTQPFVL |
| 1009-1033 | QPFVLTSLSQGQNPDRQPHDLSIDI |
| 1029-1053 | LSIDIYSRTLFWTCEATNTINVHRL |
| 10491073 | NVHRLSGEAMGVVLRGDRDKPRAIV |
| 1253-1266 | CGEPPTCSPDQFAC |
| 1278-1295 | WRCDGFPECDDQSDEEGC |
| 1316-1332 | RCDGEADCQDRSDEADC |
| 1370-1383 | CEITKPPSDDSPAH |

Additional peptides would be readily apparent to the artisan of ordinary skill.

[0439] 19.3.1 Single Chain Fv Molecules Developed by Phage Display

[0440] Peptides were chosen from the Zmax1 (LRP5) sequence (SEQ ID NO: 3) to screen for single chain Fv (scFv) molecules by phage display. Similar peptides can be chosen for LRP6, HBM and HBM-like proteins to screen for scFv molecules. As discussed below, all mention of LRP5 is also meant to include these other proteins.

[0441] A total of 17 peptides from the Zmax1 sequence were selected for synthesis and subsequent phage display screen for scfv molecules. All peptide synthesis and phage display work was performed at ° Cambridge Antibody Technology (CaT) in Cambridge, UK. Peptides were selected based on criteria as described above.

TABLE 12

| Protein Domain | Zmax1 Residues | LRP6 Residues | % Identity |
|---|---|---|---|
| Spacer 1 (+G171V) | 161-181 | 148-168 | 76% |
| Spacer 1 (−G171V) | 161-181 | 148-168 | 76% |
| EGF 1 | 301-321 | 288-308 | 76% |
| Spacer 2 | 401-421 | 388-408 | 52% |
| EGF 2 | 611-631 | 598-618 | 62% |
| Spacer 3 | 781-801 | 768-788 | 62% |
| EGF 3 | 921-941 | 908-928 | 10% |
| Spacer 4 | 1000-1021 | 988-1008 | 26% |
| EGF 4 | 1229-1249 | 1219-1239 | 76% |
| LDLR 1 | 1261-1282 | 1252-1272 | 81% |
| LDLR 2 | 1300-1320 | 1290-1310 | 57% |
| LDLR 3 | 1338-1358 | 1328-1348 | 48% |
| Cytosolic 1 | 1418-1438 | 1405-1425 | 14% |
| Cytosolic 1 | 1516-1536 | 1503-1525 | 52% |
| Cytosolic 1 | 1535-1555 | 1524-1544 | 81% |
| Cytosolic 1 | 1595-1615 | 1592-1613 | 82% |
| Spacer 2 (cross reactive) | 421-441 | 408-428 | 100% |

[0442] Note that a number of these regions (e.g., 401-421, 421-441, 781-801, and 1229-1249) share 100% identity with mouse LRP5 (see FIG. 26). Therefore, these may be used against both mouse and human forms of the protein. The peptide 421-441 was included to facilitate the generation of an antibody that would recognize both Zmax1 (LRP5) and LRP6 (see FIG. 27). Two peptides were synthesized spanning the HBM mutation site (Zmax1 residues 161-181), one with the Zmax1 sequence and the other containing the HBM sequence.

[0443] Once scFv molecules were isolated, they were used as reagents in immunochemistry to detect Zmax1 (LRP5) protein expression in a variety of human normal and diseased tissues. The details of the scFV antibody inmmunohistochemical analysis of three phage clones against peptide 1000-1021 (i.e., IKRAKDDGTQPFVLTSLSQGQN; SEQ ID NO: 714) of the extracellular domain of Zmax1 showed positive staining with cardiac muscle, kidney, lung and liver. Expression was also detected in prostate carcinoma. These results are consistent with mRNA tissue distribution profiles as well as with the published reports of LRP5 MRNA localization (Kim et al., 1998 J. Biochem. 124: 1072-6). The resulting phage clones arise from pools and will be sequenced to identify potential variants in the Fv region of the molecules. Once identified, the suitable scFVs can then be subcloned into variable heavy chain and variable light chain DNA constructs for cotransfection into COS cells for final assembly of an intact and functional immunoglobulin gamma (IgG) molecule. The IgG that is expressed by the cells can then be further characterized for specificity and reactivity as would be known in the art.

[0444] 19.3.2 Monoclonal Antibody Development

[0445] Monoclonal antibodies can be developed to Zmax1 (LRP5), LRP6, HBM and HBM-like proteins/polypeptides by complete cell and adenovirus immunization of, for example, Balb/c mice (antibodies to all forms are contemplated even when only a few examples are discussed in detail). Dendritic cells can be isolated from spleens of Balb/c mice, for example, and the cells expanded in vitro in the presence of growth factors IL-4 and GM-CSF. The dendritic cells can then be infected with HBM or Zmax1 adenovirus particles. The cells are then cultured for 24 hours prior to intravenous injection into Balb/c mice. Dendritic cells (1×10⁶ cells/mouse) are injected 2-3 times every 3-4 weeks over a three month period.

[0446] Alternatively, purified HBM and Zmax DNAs in, for example, the pcDNA3.1 expression vector, can be coated on colloidal gold particles. These particles can then be injected subcutaneously into the desired mouse using gene gun technology. Approximately, 5 μg cDNA/mouse can be injected. Injections are performed 4-6 times every 2 weeks over approximately a 3 month period.

[0447] Another option is that cells (any species of animal, but preferably Balb/c mouse strain or the same species as the mouse strain being used which is related to limit antigen response to non-specific protein) over expressing HBM and Zmax1 (LRP5) and their respective adenovirus will be injected into the mice every 2-3 weeks for a period of about 1.5 to 3 months, as necessary. The bleeds from the mice can be tested for reactivity with the native and denatured protein by ELISA. (using purified protein or protein-fusions), cell based ELISA, inmmunohistochemical staining and Western blotting. Serum samples from the animals can be screened by FACS (fluorescent activated cell sorting) using cells infected with Zmax1 or HBM adenovirus. The spleen cells (antibody producing cells) from the mice with the strongest reactivity can then be fused with a myeloma to generate the hybridoma cells. The conditioned media from the hybridoma is then screened for the positive cell colonies for subsequent cloning. These cloned cells can then be injected into the intraperitoneal space in mice for ascites production.

[0448] 19.3.3 Polyclonal Antibody Applications

[0449] Polyclonal antibodies directed against Zmax1 (LRP5) and LRP6 were developed to determine the function of these proteins, analyze the expressed pattern and levels in various tissues, cells or any biological sample. Similar antibodies could be prepared which distinguish the wild type forms from the HBM and HBM-like variants.

[0450] Uses for polyclonal antibodies against Zmax1, HBM, HBM-like polypeptides, and LRP6 include but are not limited to: analysis of bone cross-sectional mounts, tissue distribution, evaluation of expression of the protein from bone biopsy samples of affected/non-affected family members (e.g., bone cell digests, explants of bone marrow stromal cell cultures), evaluation of protein expression levels in transiently or stably transfected cells, evaluating protein concentration in tissues, serum or body fluid, purification of full length or fragments of these proteins for ligand hunting and functional assay development, identification of ligands or proteins which interact with these proteins, and elucidations of the signaling pathways of LRP6, Zmax1 (LRP5) and HBM, and related variants.

[0451] For example, Zmax1 cloned in pcDNA3.1 (Invitrogen, Carlsbad, Calif.). This was used to generate ³⁵S-labeled in vitro translated (Promega, Madison, Wis.) Zmax1. Antibody (10 μg/ml) 3109 and 3110, which are directed against peptide immunogen, RWKASKYYLDLNSDSDPY (SEQ ID NO:711), was combined with 20 μl of the in vitro translated product in the presence of either 10 μg/ml specific peptide (i.e., RWKASKYYLDLNSDSDPY; SEQ ID NO: 711) or non-specific peptide (i.e., SGWNECASSNGHCSH; SEQ ID NO: 712) or no peptide and incubated for 1.5 hr at 4° C. Protein A Sepharose was then added to the samples (previously blocked for about 1.5 hr with reticulocyte lysate), and the samples were shaken for 1 hour at 4° C. The protein A Sepharose was washed 3 times with 0.5 ml of PBS. The bound protein was subsequently separated on a 4-12% gradient NuPAGE gel (Invitrogen) according to manrufacturer's instructions. The gel was dried at 80° C. for 30 min and then exposed to Kodak X-OMAT-AR film for 24 to 48 hr. The specific peptide was observed to significantly compete for the ³⁵S-labeled Zmax1 immunoprecipitated protein with either antibody. The competition was not observed with a non-specific peptide.

[0452] These antibodies can also be used for immunohistochemistry. For example, HBM transgenic and wild-type mice were sacrificed using CO₂ narcosis. Mouse calvariae were removed intact, and the soft tissues gently dissected. The bones were fixed in 10% phosphate buffered formalin for 24 hours for further processing and analysis. After fixation, calvariae were decalcified in TBD-2 decalcifying agent (Shandon, Pittsburgh, Pa.) for about 7-8 hours and then dehydrated in graded alcohol. Calvariae were then bisected perpendicular to the sagittal suture through the central portion of the parietal bones parallel to the lambdoidal and coronal sutures and embedded in paraffin. Four to six 5 μm thick representative sections were cut.

[0453] For example, the rabbit polyclonal antibody, Zmax1/HBM (i.e., antibody 3109 and 3110) recognize Zmax1 (LRP5) in both HBM transgenic and wild-type mouse calvariae. An anti-Zmax1 or anti-HBM antibody can be used to detect Zmax1 or HBM protein in order to evaluate its abundance and pattern of protein expression. Detection can be facilitated by coupling (i.e., physically linking) the antibody to a detectable substance. Examples of detectable substances include various enzymes, prosthetic groups, fluorescent materials, luminescent materials, bioluminescent materials, and radioactive materials. Examples of suitable enzymes include horseradish peroxidase, alkaline phosphatase, P-galactosidase, or acetylcholinesterase; example of suitable prosthetic group complexes include streptavidinibiotin and avidin/biotin; examples of suitable fluorescent materials include umbelliferone, fluorescein, fluorescein isothiocyanate, rhodamine, dichlorotriazinylamine fluorescein, dansyl chloride or phycoerythrin; and example of a luminescent material includes luminol; examples of bioluminescent materials include luciferase, luciferin and acquorien; and examples of suitable radioactive material include ¹²⁵I, ¹³¹I, ³⁵S, and ³H. Alternatively, a secondary antibody can be employed that detects the presence of the primary Zmax1 polyclonal antibody. An example would be an antibody that recognized all rabbit immnunoglobulins. This secondary antibody could be coupled in an identical manner as described above to facilitate detection. Controls comprised samples with the avidin peroxidase, but without antibody. Intensive positive staining of stroma cells and mesenchymal cells was observed in the suture area. Pre-osteoblasts and osteoblasts were observed to stain within the periosteum and some osteocytes with antibody 3109 and 3110 in the calvariae of the HBM compared to wild-type mice. High magnification of tissue calvaria sections of the HBM transgenic mice showed a pronounced cell membrane staining of the osteocytes and the cells within the suture area.

[0454] Similar antibodies could be prepared to HBM-like proteins and polypeptides, as would be readily appreciated by the artisan of ordinary skill.

[0455] 20. Methods of Use: Gene Therapy

[0456] In recent years, significant technological advances have been made in the area of gene therapy for both genetic and acquired diseases (Kay et al., 1997 Proc. Natl. Acad. Sci. USA, 94: 12744-6). Gene therapy can be characterized as the deliberate transfer of DNA for therapeutic purposes. Improvement in gene transfer methods has allowed for development of gene therapy protocols for the treatment of diverse types of diseases. Gene therapy has also taken advantage of recent advances in the identification of new therapeutic genes, improvement in both viral and nonviral gene delivery systems, better understanding of gene regulation, and improvement in cell isolation and transplantation.

[0457] The preceding experiments identify the HBM gene as a dominant mutation conferring elevated bone mass. Additional BBM-like genes are identifiable based on the model and data presented herein regarding the propellers and structure of the HBM protein. The fact that this mutation is dominant indicates that expression of the HBM protein causes elevated bone mass. Older individuals carrying the HBM gene, and, therefore expressing the HBM protein, do not suffer from osteoporosis. These individuals are equivalent to individuals being treated with the HBM protein. These observations are a strong experimental indication that therapeutic treatment with the KBM protein prevents osteoporosis. The bone mass elevating activity of the HBM gene is termed “HBM function” or “HBM like phenotype” in the instance of other HBM variants.

[0458] Therefore, according to the present invention, a method is also provided of supplying HBM function to mesenchymal stem cells (Onyia et al., 1998 J. Bone Miner. Res. 13: 20-30; Ko et al., 1996 Cancer Res. 56: 4614-9). Supplying such a function provides protection against osteoporosis. The HBM gene or a part of the gene or other HBM-like gene may be introduced into the cell in a vector such that the gene remains extrachromosomal. In such a situation, the gene will be expressed by the cell from the extrachromosomal location.

[0459] Vectors for introduction of genes both for recombination and for extrachromosomal maintenance are known in the art, and any suitable vector may be used. Methods for introducing DNA into cells such as electroporation, calcium phosphate co-precipitation, and viral transduction are known in the art, and the choice of method is within the competence of one skilled in the art (bobbins, ed., Gene Therapy Protocols, Human Press, NJ (1997)). Cells transformed with the HBM gene (or HBM-like gene) can be used as model systems to study osteoporosis and drug treatments that promote bone growth.

[0460] As generally discussed above, the HBM or HBM-like gene or biologically active fragment thereof, where applicable, may be used in gene therapy methods in order to increase the amount of the expression products of such genes in mesenchymal stem cells (in all instances where discussing HBM gene and its cognate product, the HBM-like gene and cognate protein is also contemplated). It may be useful also to increase the level of expression of a given H1BM protein, or a fragment thereof, even in those cells in which the wild type gene is expressed normally. Gene therapy would be carried out according to generally accepted methods as described by, for example, Friedman, Therapy for Genetic Diseases, Friedman, Ed., Oxford University Press, pages 105-121 (1991).

[0461] A virus or plasmid vector containing a copy of the HBM gene linked to expression control elements and capable of replicating inside mesenchymal stem cells, is prepared. Suitable vectors are known and described, for example, in U.S. Pat. No. 5,252,479 and WO 93/07282, the disclosures of which are incorporated by reference herein in their entirety. The vector is then injected into the patient, either locally into the bone marrow or systemically (in order to reach any mesenchymal stem cells located at other sites, i.e., in the blood). If the transfected gene is not permanently incorporated into the genome of each of the targeted cells, the treatment may have to be repeated periodically.

[0462] Gene transfer systems known in the art may be useful in the practice of the gene therapy methods of the present invention. These include viral and non-viral transfer methods. A number of viruses have been used as gene transfer vectors, including polyoma, i.e., SV40 (Madzak et al., 1992 J. Gen. Virol 73: 1533-6), adenovirus (Berlner, 1992 Curr. Top. Microbiol. Immunol. 158: 39-61; Berkner et al., 1988 BioTechniques, 6: 616-629; Gorziglia et al., 1992 J. Virol. 66: 4407-12; Quantin et al., 1992 Proc. Natl. Acad. Sci. USA 89: 2581-2584; Rosenfeld et al., 1992 Cell 68: 143-155; Wilkinson et al., 1992 Nucl. Acids Res. 20: 2233-39; Stratford-Perricaudet et al., 1990 Hum. Gene Ther. 1: 241-256), vaccinia virus (Mackett et al., 1992 Biotechnology 24: 495-499), adeno-associated virus (Muzyczka, 1992 Curr. Top. Microbiol. Immunol. 158: 91-123; Ohi et al., 1990 Gene 89: 279-282), herpes viruses including HSV and EBV (Margolskee, 1992 Curr. Top. Microbiol. Immunol. 158: 67-90; Johnson et. al., 1992 J. Virol., 66: 2952-65; Fink et al., 1992 Hum. Gene Ther. 3: 11-9; Breakfield et al., 1987 Mol. Neurobiol. 1: 337-371; Fresse et al., 1990 Biochem. Phannacol., 40: 2189-2199), and retroviruses of avian (Brandyopadhyay et al., 1984 Mol. Cell Biol., 4: 749-754; Petropouplos et al., 1992 J. Virol. 66: 3391-3397), murine (Miller, 1992 Curr. Top. Microbiol. Immunol. 158: 1-24; Miller et al., 1985 Mol. Cell Biol. 5: 431-437; Sorge et al., 1984 Mol. Cell Biol. 4: 1730-7; Mann et al., 1985 J. Virol. 54: 401-7), and human origin (Page et al., 1990 J. Virol. 64: 5370-6; Buchschalcher et al., 1992 J. Virol. 66: 2731-9). Most human gene therapy protocols have been based on disabled murine retroviruses.

[0463] Non-viral gene transfer methods known in the art include chemical techniques such as calcium phosphate coprecipitation (Graham et al., 1973 Virology 52: 456-67; Pellicer et al., 1980 Science 209: 1414-22), mechanical techniques, for example microinjection (Anderson et al., 1980 Proc. Natl. Acad. Sci. USA, 77: 5399-5403; Gordon et al., 1980 Proc. Natl. Acad. Sci. USA, 77: 7380-4; Brinster et al., 1981 Cell 27: 223-231; Constantini et al., 1981 Nature 294: 92-94), membrane fusion-mediated transfer via liposomes (Felgner et al., 1987 Proc. Natl. Acad. Sci. USA 84: 7413-7; Wang et al., 1989 Biochemistiy 28: 9508-14; Kaneda et al., 1989 J. Biol. Chem. 264: 12126-9; Stewart et al., 1992 Hum. Gene Ther. 3: 267-275; Nabel et al., 1990 Science 249: 1285-8; Lim et al., 1992 Circulation 83: 2007-1 1), and direct DNA uptake and receptor-mediated DNA transfer (Wolff et al., 1990 Science 247: 1465-8; Wu et al., 1991 BioTechniques 11: 474-85; Zenke et al., 1990 Proc. Natl. Acad. Sci. USA 87: 3655-9; Wu et al., 1989 J. Biol. Chem. 264: 16985-7; Wolff et al., 1991 BioTechniques 11: 474-45; Wagner et al., 1990; Wagner et al., 1991 Proc. Natl. Acad. Sci. USA, 88: 4255-9; Cotten et al., 1990 Proc. Natl. Acad. Sci. USA, 87: 4033-7; Cuniel et al., 1991 Proc. Natl. Acad. Sci. USA, 88: 8850-4; Curiel et al., 1991 Hum. Gene Ther. 3: 147-54). Viral-mediated gene transfer can be combined with direct in vivo vectors to the mesenchymal stem” cells and not into the surrounding cells (Romano et al., 1998 In Vivo,. 12: 59-67; Gonez et al., 1998 Hum. Mol. Genetics 7:1913-9). Alternatively, the retroviral vector producer cell line can be injected into the bone marrow (Culver et al., 1992 Science 256: 1550-2). Injection of producer cells would then provide a continuous source of vector particles. This technique has been approved for use in humans with inoperable brain tumors.

[0464] In an approach which combines biological and physical gene transfer methods, plasmid DNA of any size is combined with a polylysine-conjugated antibody specific to the adenovirus hexon protein, and the resulting complex is bound to an adenovirus vector. The trimolecular complex is then used to infect cells. The adenovirus vector permits efficient binding, internalization, and degradation of the endosome before the coupled DNA is damaged.

[0465] Liposome/DNA complexes have been shown to be capable of mediating direct in vivo gene transfer. While in standard liposome preparations the gene transfer process is non-specific, localized in vivo uptake and expression have been reported in tumor deposits, for example, following direct in situ administration (Nabel, Hum. Gene Ther., 3:399-410 (1992)).

[0466] 21. Methods of Use: Transformed Hosts and Transgenic Animals as Research Tools and for the Development of Pharmaceuticals

[0467] Cells and animals that carry the HBM, HBM-like, Zmax1 (LRP5), or LRP6 genes, used as model systems, are valuable research tools to study and test for substances that have potential as therapeutic agents (Onyia et al., 1998 J. Bone Miner. Res., 13: 20-30; Broder et al., 1997 Bone, 21: 225-35). Discussion of one of these is meant to include the others, e.g., discussion of HBM is meant to include HBM-like variants, and so forth.

[0468] Cells for this purpose are typically cultured mesenchymal stem cells. These may be isolated from individuals with somatic or germline HBM genes. Alternatively, the cell line can be engineered to carry the HBM or HBM-like gene, as described above. After a test substance is applied to the cells, the transformed phenotype of the cell is determined. Any trait of transformed cells can be assessed, including, for example, formation of bone matrix in culture (Broder et al., 1997 Bone, 21: 225-235), mechanical properties (Kizer et al., 1997 Proc. Natl. Acad. Sci. USA 94: 1013-8), expression of marker genes and response to application of putative therapeutic agents.

[0469] Transgenic modified animals and cell lines may be used to test therapeutic agents. Transgenic modifications include, for example, insertion of the Zmax1 (LRP5) gene, LRP6, HBM gene or HBM-like gene and disrupted homologous genes. Alternatively, the inserted Zmax1, LRP6, HBM, and/or HBM-like gene of the animals may be disrupted by insertion or deletion mutation of other genetic alterations using conventional techniques, such as those described by, for example, Capecchi, 1989 Science 244: 1288; Valancuis et al., 1991 Mol. Cell Biol. 11: 1402; Hasty et al., 1991 Nature 350: 243;Shinkai et al., Cell, 68:855 (1992); Mombaerts et al., Cell, 68:869 (1992); Philpott et al., 1992 Science 256: 1448; Snouwaert et al., 1992 Science 257: 1 OS3; Donehower et al., 1992 Nature 356: 215. After test substances have been administered to the animals, the growth of bone must be assessed. If the test substance modulates (e.g., enhances) the growth of bone, then the test substance is a candidate therapeutic agent. These animal models provide an extremely important vehicle for potential therapeutic products.

[0470] The present invention also provides animals and cell lines wherein the expression of endogenous genes are activated, and may be further amplified, which does not require in vitro manipulation and transfection of exogenous DNA encoding Zmax1 (LRP5) or HBM proteins. These methods are described for example in PCT Application WO 94/12650 and U.S. Pat. No. 5,968,502, both of which are herein incorporated in their entirety by reference. In addition, the present invention includes methods wherein endogenous activation or over-expression is achieved by in situ homologous recombination, non-homologous recombination, or illegitimate recombination methods. These methods are described for example in PCT Applications WO 99/15659 and WO 00/49162, both of which are incorporated herein in their entirety.

[0471] 21.1 Creating Transgenic and Gene-Targeted Animals

[0472] The present invention provides genetically modified animals that recapitulate the human HBM or a HBM-like phenotype. The approaches taken involve the creation of both transgenic and gene-targeted animals that have the human G to T nucleotide substitution incorporated into the genome, express human Zmax1 (LRP5) or express a variant with a bone mass altering phenotype. These approaches can be used with any gene, such as HBM, HBM-like, LRP5 and LRP6 systems.

[0473] 21.1.1 Transgenic Mice Over-Expressing the HBM Polymorphism

[0474] Plasmid constructs were prepared that utilized either the CMVbActin or type I collagen promoters to drive expression of the human HBM cDNA. The most commonly-used promoters for mammalian expression are from cytomegalovirus (CMV), Rous sarcoma virus (RSV), Simian virus 40 (SV40), and EF-1a (human elongation factor 1a-subunit). CMV is derived from the human cytomegalovirus immediate-early viral promoter. CMV is a stronger promoter in most cell lines than either RSV or SV40. The RSV promoter is derived from an avian virus and tends to be a strong promoter in avian cell lines. The SV40 promoter expresses well in cell lines that carry the large T antigen, such as COS-1. In these cell lines, the plasmid is replicated to higher copy numbers. EF-1a is beginning to be more widely used for recombinant protein expression. EF-1a is the promoter from the human elongation factor 1a-subunit, a gene that is highly expressed and conserved in mammalian cell lines.

[0475] The chimeric CMVbActin promoter is a strong promoter that has been shown to produce ubiquitous gene expression in transgenic mice including bone. This promoter was chosen to drive expression of HBM in a manner consistent with the reported widespread expression of the endogenous mouse Zmx1 (LRP5) gene. Although the HBM phenotype is observed in bone, the HBM gene may have direct or indirect effects in other tissues. Therefore, other strong ubiquitous promoters may be utilized as would be known to those skilled in the art.

[0476] Type I collagen promoters provide tissue-restricted gene expression wherein expression is primarily limited to bone. Other bone-specific promoters are available that could result in expression of HBM in bone. For example, promoters associated with proliferation of osteoblasts include histone, type I collagen, TGFβ1, MSX2, cfos/cJun and Cbfa1 may be used. Promoters associated with bone matrix maturation including alkaline phosphatase, MGP, Cbfa1, Fra/Jun and Dlx5 also can be used. Promoters associated with bone mineralization such as osteocalcin, osteopontin, bone sialoprotein and collagenase also can be used. The promoter chosen would be determined by, for example, the tissue expression, the degree of regulatable control and the like as would be known to the skilled artisan. For example, the type I collagen promoters were chosen to insure that HBM would be expressed in bone in a temporal, spatial and bone cell-specific pattern resembling the endogenous pattern of Zmax1 (LRP5) expression in bone.

[0477] 21.1.2 Transgenic Mice Over-Expressing the Wild-Type (LRP5) Zmax1 Gene

[0478] Plasmid constructs were prepared using the CMVbActin and type I collagen promoters driving expression of Zmax1 (LRP5). These animals can serve as a control animal model for the HBM, HBM-like and LRP6 transgenic mice (all of which are contemplated when discussing LRP5/Zmax1). Additional controls include non-transgenic littermates and wild-type animals of an identical genetic background. Methods for preparing these animals would be similar to what is discussed for mice which over express the HBM polymorphism.

[0479] 21.1.3 LRP6 Gene Targeted Knock Out Mice

[0480] LRP6 knock-out mice were generated using Omnibank embryonic stem (ES) cells carrying a gene trap vector which inserted into the first intron of the LRP6 gene. The insert location was determined to be the LRP6 gene by an Omnibank Sequence Tag (OST) generated by reverse transcription PCR (RT-PCR) of a fusion transcript comprised of 5′ gene trap vector sequence spliced to the host gene transcript 3′ of the insertion site. The gene trap vector functionally knocks out the mouse LRP6 gene by forced spicing of LRP6 exon 1 to the IRES-LacZ-PolyA element of the gene trap, preventing transcription of LRP.

[0481] Chimeric mice were generated with ES cells, identified as OST38808, by injection into C57BL/6 albino host blastocysts which were then transferred to pseudopregnant females and allowed to develop through birth. Germ line chimeras were backcrossed to 129SvEVBrd strain mice to maintain the knockout allele of LRP6 on an inbred 1298SvEvBrd genetic background. Germ line transmission of the LRP6-KO allele was identified by PCR amplification of a gene trap specific sequence. Heterozygous LRP6-KO mating pairs were used for continued breeding. The genotype of wt and LRP6-KO progeny is determined by tail DNA PCR.

[0482] Measurements of bone density at 9 weeks of age in female heterozygous knock-out mice has shown significant (p<0.05) decreases in bone volume, trabecular number, and trabecular thickness as measured by uCT. These results are consistent with the hypothesis that LRP6 is- also involved in modulating bone density and is a target for development of therapies and drugs. Accordingly, LRP6 transgenic animals and transgenic animals expressing bone modulating variants of LRP6 are contemplated within the scope of the invention.

[0483] 21.1.4: Gene-Targeted Mice Expressing the HBM Polymorphism

[0484] A gene-targeting construct was prepared that could be used to create animals containing a HBM or HBM-like knock-in (KI) allele and a Zmax1 (LRP5) knock-out (KO) allele. The gene-targeting construct contained the HBM polymorphism in exon 3 and included a neomycin selection cassette that was linked to a transcriptional stop sequence and was flanked with lox P sites. The HBM polymorphism in mouse Zmax1 results in a glycine to valine change in the amino acid sequence at position 170 of the mouse LRP5 homolog (Genbank Accession No. AF064984). Homologous recombination is used to stably introduce the construct into the mouse genome. If the transcriptional stop sequence functioned to completely block transcription of the modified Zmax1 allele, then a functional Zmax1 knock-out allele would be generated. This would facilitate production of a homozygous knock-out animal for the Zmax1 gene.

[0485] To create the knock-in allele, Cre recombinase could be used to excise the neomycin selection cassette leaving behind the modified exon 3 and one copy of the loxp site. Cre could be introduced into single-cell fertilized embryos to facilitate ubiquitous expression of HBM or by crossing animals with transgenic mice to obtain bone-specific HBM expression. Homozygous animals could be made for the HBM knock-in allele. Alternatively, animals could be created by nuclear transfer techniques, wherein nuclei from homozygous animals is transferred into a prepared oocyte (e.g., enucleated) as is known in the art. See, e.g., Campbell et al., Nature 380: 64-68 (1996). Additional methods of creating knock out mice include engineering a homologous recombination vector wherein the ATG start codon is deleted or mutated, engineering a frame-shift mutation into the vector, engineering deletions of critical portions of the promoter region, and/ or engineering a vector to delete critical regions of the gene.

[0486] The methods used for the LRP5, LRP6 and HBM mice can similarly be used for other variants of these genes.

[0487] 21.2 Materials and Methods

[0488] 21.2.1 Construction of the Zmax1 (TRP5) Plasmid Zmax1GI_{—}3AS

[0489] The full-length Zmax1 cDNA construct has been engineered into the XbaI-NotI sites of the pCMVSPORT6.0 vector from Life Technologies (part of the Gateway cloning system) to create Zmax1GI_{—}3AS. The insert (5,278 bp) can be released from the vector by digestion with either HindIII or XbaI on the 5′ side together with either EcoRV or EcoRI on the 3′ end. A similar construct can be prepared for LRP6 and HBM-like nucleic acids as would be apparent to one of ordinary skill and is contemplated as well in the discussion of this section.

[0490] The Zmax1 (LRP5) construct was generated from four independent partial clones. These clones were isolated from a Zmax1 specific primed cDNA library. A partial Zmax1 cDNA clone existed in the internal survey sequencing clone set as L236B_P0049E08 isolated from an oligo-dT primed HeLa cell cDNA library. This clone was truncated at the 5-primed end. In order to isolate more 5-prime containing fragments necessary to generate a full length cDNA, a Zmax1 gene-specific cDNA library was generated from Clontech human liver poly-A MRNA (catalog #6510-1, lot# 9060032) and Life Technologies SuperScript® Plasmid System for cDNA Synthesis and Plasmid Cloning kit (catalog no. 18248-013). This library was designated as L401. The manufacturer's protocol was carried out with the following modifications. 1) In both first and second strand synthesis reactions, DEPC-treated water was substituted for α-³²P-dCTP. 2)Reverse transcription was primed using oligonucleotides that were selected to be specific for the Zmax1 gene at approximately 1 kb intervals. These sequences were checked using the program BLAST against the public databases to ensure Zmax1 specificity. 3)Two separate reverse transcription reactions were performed. The first reaction, (A), was primed with oligdnucleotides which annealed to the more 3′ regions of Zmax1 (LRP5) as follows:

| | |
|---|---|
| 47114: | |
| 5′-CGTACGTAAAGCGGCCGCTTGGCAATACAGA | (SEQ ID NO: 715) |
| TGTGGGA-3′ | |
| 47116: | |
| 5′-CGTACGTAAAGCGGCCGCAGTAGCTCCTCTC | (SEQ ID NO: 716) |
| GGTGGC-3′ | |
| 47118: | |
| 5′-CGTACGTAAAGCGGCCGCGCTCATCATGGAC | (SEQ ID NO: 717) |
| TTTCCG-3′ | |
| 47120: | |
| 5′-CGTACGTAAAGCGGCCGCGCACTGCTGTTTG | (SEQ ID NO: 718) |
| ATGAGG-3′ | |

[0491] The second reaction, (B), used the previously mentioned four oligonucleotides, as well as

| | |
|---|---|
| 47108: | |
| 5′-CGTACGTAAAGCGGCCGCGAGTGTGGAAGAA | (SEQ ID NO: 719) |
| AGGCTGC-3′ | |
| 47110: | |
| 5′-CGTACGTAAAGCGGCCGCAGTAGAGCTTCCC | (SEQ ID NO: 720) |
| CTCCTGC-3′ | |
| 47112: | |
| 5′-CGTACGTAAAGCGGCCGCGTCCATCACGAAG | (SEQ ID NO: 721) |
| TCCAGGT-3′ | |

All oligonucleotides contained a NotI linker sequence and were used at a concentration of 0.02 ug/ul. 4)The SalI-adapted cDNA from both reverse transcription reactions was size-fractionated by electrophoresis on 1% agarose, 0.1 ug/ml ethidiurn bromide, 1×TAE gels. The ethidium bromide-stained cDNA between 0.6 and 8.0 kb was excised from the gel. The cDNA was purified from the agarose gel by electroelution (ISCO Little Blue Tank Electroelutor®) using the manufacturer's protocol. The purified cDNA from reactions A and B were then pooled together. 5) The size-fractionated SalI-adapted cDNA was ligated to NotI-SalI digested pBluescript® (Stratagene, La Jolla, Calif.).

[0493] Ligated library cDNA (3 ml) was used to transform electrocompetent E. coli cells (ElectroMAX® DH10B cells and protocol, Life. Technologies catalog no. 18290-015, BioRad E. coli pulser, voltage 1.8 KV, 3-5 msec pulse). The transformed cells were plated on LB-ampicillin (100 μg/ml) agar plates and incubated overnight at 37° C. Approximately 10⁶ colony forming units (cfu) were plated at a density of 50,000 cfu/150 mm plate. Cells were washed off the plates with LB media, and collected by centrifugation. Plasmid DNA was purified from the cells using the QIAGEN Plasmid Giga Kit and protocol (catalog no. 12191) at a final concentration of 2.05 μg/μl.

[0494] Two probes for use in library screening were generated by the polymerase chain reaction (PCR) using 100 ng of library L401 as template. Standard PCR techniques were used. A reaction mixture contained 10 pmol of each oligo primer; 0.2 mM each dATP, dTTP, dCTP and dGTP (PE Applied Biosystems catalog no. NS08-0260); 1.5 units Expand™ High Fidelity Taq DNA polymerase and 1×PCR reaction buffer (Roche Molecular Biochemicals, catalog no. 732-641; 10 mM Tris-HCl, 1.5 mM MgCl², 50 mM KCl, pH 8.3). The mixture was incubated at 99° C. for one minute, followed by 30 cycles of 96° C. for 15 seconds, 50° C for 30 seconds, 720 C for 1 minute with a final incubation at 72° C. for 7 minutes (MJResearch DNA Engine® Tetrat PTC-225). The first was generated using oligos

| | | |
|---|---|---|
| 107335: | 5′-CAGCGGCCTGGAGGATGC-3′ | (SEQ ID NO: 722) |
| 107338: | 5′-CGGTCCAGTAGAGGTTTCG-3′ | (SEQ ID NO: 723) |

[0495] which amplify a NotI-SalI fragment of the Zmax1 gene. The second was generated using oligos

| | | |
|---|---|---|
| 107341: | 5′-CATCAGCCGCGCCTTCATG-3′ | (SEQ ID NO: 724) |
| 107342: | 5′-CCTGCATGTTGGTGAAGTAC-3′ | (SEQ ID NO: 725) |

which amplify a SacI-KpnI fragment of the Zmax1 gene. Both PCR products were purified using the Qiaquick® kit and the manufacturer's protocol (Qiagen catalog 28106) then subdloned into the vector pCRII-TOPO® (Invitrogen catalog no. K4600) following the manufacturer's protocol. Positive subclones were identified by restriction digestion of purified plasmid DNA (using standard molecular biology techniques) and subsequent DNA sequence analysis (ABI Prism BigDye Terminator Cycle® sequencing, catalog no. 4303154, ABI 377 instruments). Probe DNA was isolated by EcoRI restriction digestion (New England Biolabs, catalog no. R0101L) of the respective sequence-verified pCRII-TOPO® clone. Restriction fragments were -size-fractionated by gel electrophoresis on 1% agarose, 0.1 ug/ml ethidium bromide, 1×TAE gels. Insert DNA was excised from the gel and purified using the Clontech NucleoSpin® Nucleic Acid Purification Kit (catalog no. K3051-2) following the manufacturer's protocol. The purified DNA fragment (25-50 ng) was labeled with Redivue® (α³²P)-dCTP (Amersham Pharmacia, catalog no. AA0005) using the Prime-It II® Random Primer labeling Kit and protocol (Stratagene, catalog no. 300385). Unincorporated dCTP was removed with Amersham's NICK® column and protocol (catalog no. 17-0855-02).

[0497] Two rounds of screening library L401 were initiated to isolate fragments of the Zmax1 (LRP5) gene. In the first, forty-three 150 cm LB-100 μg/ml ampicillin agar plates were plated with primary transformants from L401 at a density of about 3,000-4,000 colonies per plate. This library was screened using the ³²P-labeled probe (NotI-SalI fragment) as described above at 500,000-1,000,000 cpm/ml hybridization buffer, using standard molecular biology protocols. From this primary screen, 13 single colonies were identified based on positive hybridization to the Zmax1 probe. Plasmid DNA, prepared using the QIAprep Spin Miniprep Kit and protocol (Qiagen Inc., catalog no. 27106), was analyzed by restriction digestion and sequence analysis as described above. cDNA clone # 44 was isolated from this screen and sequence verified to contain a partial Zmax1 clone.

[0498] In the second library screen, one hundred-and-four 150 cm LB ampicillin 100 ug/ml agar plates were plated with primary transformants from L401 at a density of 3000-4000 colonies per plate. This library was screened using the ³²P-labeled probe (SacI-KpnI) exactly as previously described. From this primary screen, 48 colonies were identified based on positive hybridization to the Zmax1 (LRP5) probe. Since these colonies were not single colony isolates, a secondary screen was initiated where each of the 48 primary isolates was plated at a density of approximately 500 colonies per plate. These colonies were then screened exactly as the primaries using the labeled SacI-KpnI fragment as probe. Thirty-four of the 48 primary clones resulted in positive hybridization to the Zmax1 probe and were isolated as single colonies. Plasmid DNA was prepared and analyzed as described above. cDNA isolate #71_{—}2 was isolated from this screen and sequence verified to contain a partial Zmax1 clone.

[0499] In all cases, the sequence of any Zmax1 (LRP5) isolate was compared to a reference sequence (i.e., the sequence of the wild-type Zmax1 allele from an affected member of the HBM kindred). This analysis was important since DNA polymorphisms had been reported for this gene in the literature. This reference sequence is predicted to encode a polypeptide of Genbank Accession No. AF077820.

[0500] The four independent partial clones used to prepare ZmaxIGI_{—}3AS are as follows:
[0501] 1). Bases 1-1366: XbaI-SalI fragment was obtained from a Zmax1 cDNA construct, GTC.Zmax1_{—}3. GTC.Zmax1_{—}13 contains a 5075 BP insert containing the entire ORF of LRP5. The clone was blunt end cloned in the EcoRV site of pSTBlue-1. This clone was generated by fusing a 5′ clone derived from screening a bone random primed cDNA library in a pBluescript™ II derivative with a 3′ clone derived from a PCR product from a bone dT primed cDNA library in pBluescript™ II. PCR was performed using LRP5 specific forward primer 5′-GCCCGAAACCTCTACTGG ACCGAC-3′ (SEQ ID NO: 726) and reverse primer 5′-GCCCACCCCATCACAGTTCA CATT-3′ (SEQ ID NO: 727) using DNAzyme polymerase. The resultant 3.7 kb PCR product was cloned into PCR-XL-TOPO. To generate the full length clone the 5′ and 3′ plasmids were transformed into DM1 (dam-) from Gibco/BRL. The 5′ plasmid was digested with XbaI and the 3′ plasmid was digested with HindIII. The digested plasmids were filled in with T4 polymerase to generate blunt ends and cut with BclI the 1.7 kb 5′ fragment and 3.5 kb 3′ fragments were gel purified, ligated together, and cloned in the EcoRV site of pSTBlue-1. It provides a short 5′UTR, with coding sequence beginning at base 100. Furthermore, it carries some additional restriction sites at the 5′ multiple cloning site. This fragment also contains a DNA polymorphism relative to the Genbank Accession No. AF077820 sequence at position 558 resulting in an A (AF077820) to a G change; this mutation does not result in an amino acid difference (Pro).
[0502] 2). Bases 1367-2403: This clone was obtained from a Zmax1-gene primed cDNA library made from commercial human liver RNA described above. This fragment is a SalI-BamHI piece of DNA obtained from isolate #44. The sequence is identical to Genbank Accession No. AF077820.
[0503] 3). Bases 2404-4013: This BamHI-BssHII fragment was obtained from isolate #71-2 from the same library as described above. At position 3456, there is a DNA polymorphism resulting in a G (AF077820) to an A. This nucleotide difference does not change the encoded amino acid (Val).
[0504] 4). Bases 4014-5278: This BssHII-NotI fragment came from an internal clone, L236B_P0049E08. It was obtained from anoligo-dT primed HeLa cell cDNA library. The stop codon occurs at base 4947. The clone contains 331 bp of 3′ UTR sequence, including a 120 bp poly-A tail followed by the NotI site. The 3′ NotI site used in this subcloning step is a result of an added linker that was introduced at the end of the poly-A tail during library construction. A DNA polymorphism is present at base 4515 resulting in a G (AF077820) to C change that is silent at the amino acid level (Leu).

[0505] To generate the 5′ section of the Zmax1 (LRP5) gene, the XbaI-SalI fragment and SalI-BamHI fragment were ligated into the XbaI-BamHI sites of pBluescript® (Stratagene). The 3′ section of the gene was obtained by ligating the 1.61 kb BamHI-BssHII fragment from Zmax1 isolate #71_{—}2 to the 1.26 kb BssHII-NotI fragment from L236B_P0049E08. These two fragments were ligated into the BamHI-NotI sites of pBluescript®. The full length Zmax1 cDNA was engineered into the XbaI-NotI sites of the vector pCMVSPORT6.0 (Life Technologies) by ligation of the XbaI-BamHI 5′ section and the BamHI-NotI 3′ section. The resulting plasmid, ZmaxGI_{—}3AS, contains an insert of 5278 bp from the XbaI site to the NotI site of the vector's multiple cloning site. This clone is in the antisense orientation with respect to the CMV promoter present in the vector. Zmax1 coding sequence begins at base 100 and ends at base 4947, followed by 331 bp of 3-primed UTR sequence including a 120 bp poly-A tail. This full length cDNA contains three DNA polymorphisms from the reference sequence (GenBank Accession No. AF077820) that do not alter the predicted amino acid sequence. These polymorphisms are at position 558 resulting in an A to G that maintains the proline residue; at position 3456 resulting in a G to A that maintains the valine residue; and, at position 4515 resulting in a G to C that maintains the leucine residue.

[0506] The sequence of Zmax1 GI_{—}3AS (FIG. 25) also contains a DNA polymorphism relative to SEQ ID NO. 1 at base, 4088 resulting in a C (SEQ ID NO: 1 and Genbank Accession No: AB017498) to T change that results in an amino acid change at position 1330 of alanine to valine. This is consistent with the sequence determined in the wild-type allele from an affected member of the HBM kindred as well as with the published sequence of GenBank Accession No. AF077820. Zmax1GI_{—}3AS also has 29 additional bases at the 5′ end relative to SEQ ID NO: 1, as well as 129 bases at the 3′ end consisting of an extra G, 120 bases of poly-A tract, and the Notl site.

[0507] 21.2.2 Creation of the HBM Mutation G171V

[0508] The HBM mutation that results in a predicted amino acid change from glycine to valine at amino acid 171 was introduced into the full length human Zmax1 (LRP5) cDNA (plasmid Zmax1GI_{—}3AS) using PCR to change the G at position 611 to a T. Introduction of the HBM mutation was done using oligos 107335: (5′-CAGCGGCCTGGA GGATGC-3′; SEQ ID NO: 728) and 49513: (5′-CGGGTACATGTACTGGACAGC TGATTAGC-3′; SEQ ID NO: 729), which flank the endogenous NotI site of the Zmax1 (LRP5) gene. This method creates a new PvuII site at the 3′ end of the PCR product. A second PCR reaction was completed using oligos which introduce a ScaI site at the 5′ end of the product and contains the endogenous SalI site of Zmax1 in the 3-primed end. PCR products were purified using the QiaQuick® procedure (Qiagen Inc.); subcloned into the vector pCRII-TOPO (Invitrogen) as described above. Plasmid DNA was purified from single bacterial colonies and analyzed by restriction digest and subsequent sequence analysis, all as described above. The sequence-verified pCRII-TOPO clones were restriction digested with NotI-PvuII and ScaI-SalI, respectively. The resulting DNA fragments were size fractionated and purified as described above. These two fragments were then subdloned into the vector, pBluescript® that had been prepared by NotI-SalI digestion. Both PvulI and ScaI produce blunt ends when used to digest double stranded nucleic acids. Thus, the resulting ligated fragment fails to recreate either the PvuII or ScaI site and contains only the consensus Zmax1 sequence, with the exception of the newly introduced HBM mutation. To introduce the mutation into the full length Zmax1 gene, this resulting plasmid was digested with MscI and SalI, while the 5′ region of Zmax1 was obtained by XbaI-MscI digestion of Zmax1 plasmid GTC.Zmax1_{—}13. These two fragments were ligated together into XbaI-SalI digested pBluescript®, in effect creating a similar 1.366 klb XbaI-SalI fragment. The only difference being that this construct contains the HBM mutation described above. The full length HBM cDNA then was assembled into pCMVSPORT6.0 exactly as described above for the Zmax1 gene, with the substitution of this newly created XbaI-SalI fragment containing the HBM mutation. The entire cDNA insert was verified by DNA sequence analysis and the introduction of the HBM mutation was confirmed.

[0509] The resulting plasmid, HBMGI_{—}2AS (FIG. 24), contains an insert of 5,278 bp from the XbaI site to the NotI site of the vector's multiple cloning site. This clone is in the antisense orientation with respect to the CMV promoter in the vector. HBM coding sequence begins at base 100 and ends at base 4947, followed by 331 bp of 3-primed UTR sequence which includes a 120 bp poly-A tail. This full length cDNA contains three DNA polymorphisms from the reference sequence, which do not alter the amino acid sequence. These polymorphisms occur at position 558, resulting in an A to G change that maintains the proline residue; at position 3456 resulting in a G to A change that maintains the valine residue; and, at position 4515 resulting in a G to C change that maintains the leucine residue. Additionally, the HBM mutation is present at position 611 (G in Zmax1 to T in HBM) which results in a predicted amino acid change of glycine to valine at amino acid position 171, as found in affected members of the HBM kindred. This insert sequence was used to generate the construct used for IBM over-expressing transgenic mice.

[0510] 21.3 Transgene Preparation

[0511] The examples provided herein are illustrations of how transgenic animals can be prepared. Additional transgenic animals can be prepared as would be known in the art. See, for example, Glenn Monastersley et al., ed, Strategies in Transgenic Animal Studies (Amer. Soc. Microbiology 1995),and the references cited therein.

[0512] 21.3.1 CMVbActin Promoter-HBM cDNA (HBMMCIBA)

[0513] To prepare the CMVbactin-HBM construct, pCX-EGFP, a plasmid containing the chimeric CMVbactin promoter, was purified as a 4778 bp EcoRI fragment. Subsequently, the HBM cDNA was excised from HBMGI_{—}2AS as a 4994 bp XbaI/DraI fragment, treated with Klenow fragment of DNA polymerase, ligated to EcoRI linkers, and digested with EcoRI. This fragment was then inserted into the EcoRI site of pCX-EGFP. A SpeI/HindIII 7265 bp CMVbactin-HBM fragment was purified for microinjection into mouse embryos.

[0514] 21.3.2 Type T Collagen Promoter-HBM cDNA (HBMMTTC)

[0515] The rat type I collagen promoter-HBM construct was created by first replacing the pBS(SK-) (Stratagene) polylinker with another polylinker (i.e., comprising Kpnl-SpeI- HindIII-BglII-NdeI-SalI-SmaI-EcoRI-PstI-BamHI-XbaI-ScaI-NcoI-ClaI-NotI-SacII-SacI), that is referred to as BS(SK-)A/D. The SV40 splice and poly (A)ₙ XbaI-NcoI region (750 bp) from pcDNA I (Invitrogen, Inc.) was directionally cloned into BS(SK-)A/D. Next, a 4994 bp EcoRI HBM cDNA fragment (above) was cloned into the EcoRI site. A 3640 bp XbaI, type I collagen promoter fragment was subcloned into the XbaI site of BS(SK-) (Stratagene). The promoter fragment was then excised from BS(SK-) with SacII, blunt-ended with T4 DNA polymerase, digested with SpeI, and ligated into the HBM BS(SK-) A/D construct, which was digested with NdeI, blunted with T4 DNA polymerase, and digested with SpeI. A SpeI/ClaI 9435 bp type I collagen-HBM fragment was purified for microinjection into mouse embryos.

[0516] 21.3.3 CMVbActin Promoter-Zmax1 cDNA (Zmax1WTCBA)

[0517] The CMVbActin promoter-HBM cDNA construct from above was used to generate the final plasmid. The following three fragments were ligated together: 1) a 6.34 kb XbaI-KpnI backbone fragment from HBNMCBA; 2) a 0.64 kb XbaI-SapI fragment from HBMMCBA containing the 3′ end of the bActin promoter and the 5′ end of the HBM cDNA; and 3) a 2.8 kb SapI-KpnI fragment derived from the Zmax1 cDNA that contains the wild-type sequence. A 7.2 kb SpeI-HindIII CMVbActin-Zmax1 fragment was purified for micro-injection into mouse embryos.

[0518] 21.3.4 Type T Collagen Promoter-Zmax1 cDNA (Zmax1WTTIC)

[0519] The type I collagen-HBM cDNA construct from above was used to generate the final plasmid. The HBMMTIC plasmid was linearized with HindIII and cut with either SalI to yield a 8.52 kb HindIII-SalI fragment or SapI to yield a 2.98 kb SapI-HindIII fragment. A 2.8 kb SapI-SalI fragment from the Zmax1 (LRP5) cDNA containing the wild-type sequence was then ligated to the above two fragments to yield the final plasmid. A 9.4 kb SpeI-ClaI type I collagen-Zmax1 fragment was purified for micro-injection into mouse embryos.

[0520] 21.4 Confirmation of Transgene Expression in vitro

[0521] Plasmid constructs for HBMMCBA, BBMMTIC, Zmax1 WTCBA and Zmax1WTTIC were transiently transfected into human osteoblast (I40B) cells to measure MRNA expression as a test for functionality.

[0522] 21.4.1 Transient Transfections

[0523] HOB-02-02 cells are a clonal, post-senescent, cell line derived from the HOB-02-C1 cells (Bodine et. al, 1996, J. Bone Miner. Res. 11: 806-819). Like the parental cell line, the HOB-02-02 cells express the temperature-sensitive SV40 large T-antigen mutant, tsA209. Consequently, these cells proliferate at the permissive temperature of 34° C., but stop dividing at non-permissive temperatures of 37° C. or above. Also like the parental cell line, the HOB-02-02 cells are cultured with Growth Medium (D-MEM/F-12 containing 10% heat inactivated fetal bovine serum, 1% penicillin-streptomycin and 2 mM GlutaMAX-1) at 34° C. in a 5% C0₂/95% humidified air incubator (Forna Scientific, Marietta, Ohio).

[0524] For the transient transfections, the HOB-02-02 cells were seeded with Growth Medium at 400,000 cells/well into 6-well plates and incubated overnight at 34° C. The cells Were transfected with 0.3 mg/well of either the CMVβActin-HBM expression plasmid, the Type I Collagen-HBM expression plasmid or the corresponding empty vectors using LipofectAMINE 2000 transfection reagent according to the manufacturer's instructions (Life Technologies, Rockville, Md.). After a 24 hr incubation at 34° C., the medium was changed, and the cells were incubated for an additional 24 hr at 39° C. At the end of this last incubation, the cells were rinsed with Hank's buffered salt solution. Total cellular RNA was then isolated using TRIzol® according to the manufacturer's instructions (GibcoBRL, Grand Island, N.Y.). The RNA was treated with RNase-free DNase in order to remove contaminating DNA as previously described (Bodine et al., 1997, J. Cell. Biochem. 65: 368-387).

[0525] 21.4.2 TaqMan® Assay for mRNA Expression

[0526] TaqMan® primers and probes were chosen based on human and mouse Zmax1 (LRP5) cDNA sequences. The selected sequences were designed to be gene-specific by analysis of an alignment of human and mouse Zmax1 (LRP5) sequences as illustrated in FIG. 26.

[0527] TaqMan® quantitative reverse transcriptase-polymerase chain reaction (RT-PCR) analysis of RNA isolated from human cells was performed as described by the manufacturer (PE Applied Biosystems, Foster City, Calif.) using the following primers and probe set:

| | |
|---|---|
| Human Zmax1-1/HBM-1: | |
| Forward Primer: | |
| 5′-GTCAGCCTGGAGGAGTTCTCA-3′ | (SEQ ID NO: 730) |
| Reverse Primer: | |
| 5′-TCACCCTTGGCAATACAGATGT-3′ | (SEQ ID NO: 731) |
| Probe: | |
| 6-FAM-5′-CCCACCCATGTGCCCGTGACA-3′ | (SEQ ID NO: 732) |

[0528] Results from the experimental primers/probe set were normalized to human GAPDH levels using the multiplex protocol with the human GAPDH control kit from PE Applied Biosystems. Species-specific TaqMan® quantitative RT-PCR analysis of RNA isolated from murine cells and tissues was performed as described by the manufacturer (PE Applied Biosystems, Foster City, Calif.) using the following primers and probes sets:

| | |
|---|---|
| Human Zmax-1/HBM-1: | |
| Forward Primer: | |
| 5′-CGTGATTGCCGACGATCTC-3′ | (SEQ ID NO: 733) |
| Reverse Primer: | |
| 5′-TTCCGGCCGCTAGTCTTGT-3′ | (SEQ ID NO: 734) |
| Probe: | |
| 6-FAM-5′-CGCACCCGTTCGGTCTGACGC | (SEQ ID NO: 735) |
| AGTAC-3′ | |
| Mouse Zmax-1/HBM-1: | |
| Forward Primer: | |
| 5′-CTTTCCCCACGAGTATGTTGGT-3′ | (SEQ ID NO: 736) |
| Reverse Primer: | |
| 5′-AAGGGACCGTGCTGTGAGC-3′ | (SEQ ID NO: 737) |
| Probe: | |
| 6-FAM-5′-AGCCCCTCATGTGCCTCTCAA | (SEQ ID NO: 738) |
| CTTCATAG-3′ | |

[0529] Results from the experimental primers/probe sets were normalized to 18S ribosomal RNA levels using the multiplex protocol with the 18S ribosomal RNA control kit from PE Applied Biosystems. A summary of these results is presented in FIGS. 17-20.

[0530] 21.5 Production of Transgenic Mice

[0531] 21.5.1 DNA Microinjection:

[0532] Transgene fragments for micro-injection were first purified on 1% agarose gels according to the GELase protocol from Epicentre Technologies. Fragments were then further purified on cesium chloride density gradients and extensively dialyzed against 5 mM Tris (pH 7.4), and 0.1 mM EDTA.

[0533] Linearized DNA was microinjected into mouse embryos according to standard procedures. DNA was injected into primarily the male pronucleus of fertilized C57BL/6T mouse embryos. Injected embryos (n=20-35) were transferred to the oviduct (unilaterally) of day 0.5 post coitum pseudopregnant Swiss Webster embryo recipients. Offspring were tail-biopsied and genotyped at age 10-14 days.

[0534] 21.6 Production of Gene-Targeted Transgenic Mice

[0535] 21.6.1 Gene Targeting Vectors and Probes

[0536] Two gene-targeting vectors were constructed for modification of the Zmax1 (LRP5) gene in embryonic stem (ES) cells. The two constructs, illustrated in FIG. 16, designated as Zmax1 -KI/KO A&B were designed to generate two types of mutations, a knock-out (KO) of the Zmax1 gene and a Cre recombinase dependent knock-in (KI) of a nucleotide substitution in order to create a mouse model (i.e., glycine 170 to valine amino acid substitution in mouse Zmax1, of the HBM kindred.

[0537] Both gene-targeting vectors were constructed using genomic DNA of the mouse genomic DNA BAC clone 473P5 (Genbank Accession No. AZ095413) containing the first five exons of the mouse Zmax1 gene. This clone was isolated by Research Genetics (Huntsville Ala.) from their mouse 129SvJ genomic BAC library using a polymerase chain reaction (PCR) screen for exon 3. A forward and reverse primers of

| | |
|---|---|
| Forward: | |
| 5′-GAGCGGGCAGGGATGGATGG-3′ | (SEQ ID NO: 739) |
| Reverse: | |
| 5′-AGGTTGGCACGGTGGATGAAGC-3′ | (SEQ ID NO: 740) |

were used to amplify exon 3 by PCR; the following thermal cycling conditions were employed: for thirty cycles, 95° C. for 0.5 minute, 55° C. for 1 minute and 72° C. for 1 minute. Identity of this clone with mouse Zmax1 was confirmed by sequencing exon 3 using the BAC clone DNA as template. PCR products were cloned using the pGEM-T-easy T/A cloning kit.

[0539] 21.6.2 Zmax1 (LRP5) Knock-In/Knock-Out Vector

[0540] The organization of the genomic BAC clone 473P5 was characterized by Southern blot analysis using subcloned exon 1, exon 2 and exon 3 as probes and by sequencing the region spanning exon 1 through exon 5. Two different constructs were prepared for the Zmax1 KI/KO targeting. These constructs (A and B) differ only in flanking arms of homology. Construct (A) contains a 6.5 kb BstEII-XbaI 5′ arm of homology and a 1 kb XbaI-EcoRI 3′ ann of homology; whereas, construct (B) contains a 1 kb 5′ arm of homology and a 6.0 kb 3′ arm of homology. The constructs were prepared by ligating short and long arms of homology to a LoxP flanked cassette containing the neomycin resistance gene MC1-Neo, Stratagene) and a synthetic transcriptional pause sequence (Promega).

[0541] Both Zmax1-KI/KO-targeting vectors (A and B) were modified to a G-to-T nucleotide substitution, encoding the G170V amino acid substitution, in exon 3. These modifications were introduced into by overlapping PCR mutagenesis using the wild type sequence of the short arm of homology as template. In addition, the 1 kb short arm of the Zmax1-KI/KO (B) targeting vector was modified to include a 5′ terminal PmeI restriction recognition site. The 5′ overlapping fragment was made using the following forward primer and reverse mutagenic primer:

| | |
|---|---|
| Forward: | |
| 5′-AAGCTTGTTTAAACTGGGCATGGTGGCACA | (SEQ ID NO: 741) |
| TGGTTGTAAT-3′ | |
| Reverse: | |
| 5′-GGGCTTCCACCCAGTCAGTCCAGTACATGT | (SEQ ID NO: 742) |
| ACCT-3′. | |

[0542] The thermal cycling conditions utilized for thirty cycles are 95° C. for 0.5 minute, 55° C. for 1 minute and 72° C. for 1 minute. The 3′ fragment was made using the following forward and reverse primers:

| | |
|---|---|
| Forward: | |
| 5′-CTGACTGGGTGGAAGCACCCCGGATCG | (SEQ ID NO: 743) |
| AGC-3′ | |
| Reverse (mutagenic): | |
| 5′-GAATTCATCGGTACCTGTGCGGCCGCT | (SEQ ID NO: 744) |
| TCATTG-3′. | |

The thermal cycling conditions utilized for thirty cycles are 95° C. for 0.5 minute, 55° C. for 1 minute and 72° C. for 1 minute. The final overlapping PCR used 1 ml each of the 5′ fragment and 3′ fragment PCR reactions as template and amplification was performed using the forward and reverse primers of the 5′ and 3′ fragments respectively and the same thermal cycling parameters. The final PCR product was cloned using the pGEM-T-easy T/A cloning kit. The mutagenized exon 3 was excised from Zmax1-KI/KO (1) and transferred to Zmax1-KI/KO (A) as a 600 bp BsmBI-XbaI fragment.

[0544] Probes for screening for and characterization of Zmax1-KI/KO (A) gene targeted ES cell clones are prepared by subcloning restriction fragments of BAC clone 473P5. The 5′ outside probe is a 400 bp Nde-BstEII fragment, and the 3′ outside probe is a 500 bp EcoRI-BstXI fragment.

[0545] The outside probes for Zmax1-KI/KO (B) are prepared by PCR cloning genomic fragments flanking and immediately adjacent to the targeting vector region of homology. The 5′ outside probe used for Zmax1KI/KO (B) is a 498 bp fragment generated using the forward primer of the sequence (5′-TGAGATGTCCTGTCTGTGGC-3′; SEQ ID NO: 745) and a reverse primer of the sequence (5′-TCCTTCCTTCCCTACAGTTG-3′; SEQ ID NO: 746). The thermal cycling conditions utilized with these probes for thirty cycles are: 95° C. for 0.5 minute, 55° C. for 1 minute and 72° C. for 1 minute. The 3′ outside probe is a 600 bp fragment generated using the forward primer of the sequence (5′-CCTAAGGATCTCCTTGT GTCTGTGG-3′; SEQ ID NO: 747) and a reverse primer of the sequence (5′-CTGCAGCAG GTCAGTAGCCTGC-3′; SEQ ID NO: 748). The thermal cycling conditions utilized with these probes for thirty cycles were: 95° C. for 0.5 minute, 55° C. for 1 minute and 72° C. for 1 minute. Both probes are specific for the Zmax1 gene in genomic southern analysis. PCR products are cloned using the pGEM-T-easy T/A cloning kit.

[0546] A probe for ribonuclease protection analysis of Zmax1 mRNA structure and 15 transcription levels was prepared by PCR cloning a cDNA fragment containing exon 3 through exon 4. The PCR reaction used a complete cDNA as template, a forward primer of the sequence (5′-TGAGATGTCCTGTCTGTGGC-3′; SEQ ID NO: 749), a reverse primer of the sequence (5′-TCCTTCCTTCCCTACAGTTG-3′; SEQ ID NO: 750) and the following thermal cycling conditions for thirty cycles; 95° C. for 0.5 minute, 55° C. for 1 minute and 72° C. for 1 minute. The PCR product is cloned using the pGEM-T-easy T/A cloning kit.

[0547] One skilled in the art could use similar protocols to generate other engineered KI-alleles to produce transgenic animals with an HBM-like phenotype.

[0548] 21.6.3 Gene Targeting in ES Cells

[0549] For gene targeting, embryonic stem (ES) cells are electroporated with 50 mg of linearized targeting vector and selected in 200 mg/ml G418 for 7-10 days beginning the day after electroporation. G418 resistant clones are picked, expanded and cryopreserved. Resistant clones were screened for homologous recombination by an EcoRI genomic Southern restriction fragment length analysis using the 5′ outside probe, which detects the wild type and targeted alleles of Zmax1 as 4 kb and 5 kb fragments, respectively. Gene targeted ES cell clones are thawed, expanded, and characterized by ScaI genomic restriction fragment length analysis using the 3′ outside probe, which detects the wild type and targeted alleles of Zmax1 as 9 kb and 8 kb fragments, respectively. Gene targeted clones are also characterized by sequence analysis of Zmax1 exon 3 to ensure that the G to T substitution was included in homologous recombination.

[0550] 21.6.4 Production of Gene Targeted Mice by Blastocyst Injection

[0551] To generate chimeric mice, gene targeted ES cell clones are thawed, expanded and 9-14 ES cells injected into the blastocoel of 3.5 post coitum (p.c.) host C57BL/6 blastocysts. Injected blastocysts (12-17) are then transferred unilaterally into the uterus of 2.5 p.c. pseudopregnant Swiss Webster embryo recipients and allowed to develop to term. Chimeric males are back-crossed to 129SvEv females and tested for transmission of the targeted allele by PCR geneotyping with primers specific to the neomycin resistance gene.

[0552] 21.6.5 In vitro Deletion of the Neomycin Resistance Cassette via Cre Recombinase

[0553] To generate Zmax1 (LRP5) KI mice from the Zmax1 KI/KO mice the Neomycin resistance (KO) cassette was deleted by micro injection of a Cre expressing plasmid (2 mg/ml) into the male pronucleus of Zmax1 KI/KO pre-fusion zygotes. Deletion of the KO cassette was confined by PCR analysis of the cassette insertion site.

[0554] 21.6.6 Gentling Transgenic Mice

[0555] Genomic DNA was isolated from mouse tail snips by digestion in 500 ul buffer containing 50 mM Tris-HCl, (pH 7.2), 50 mM EDTA, (pH 8.0), 0.5% SDS and 0.8 mg/ml proteinase K. Samples are incubated at 55° C. with shaking overnight. A 10 μl aliquot was heat-inactivated at 99° C. for 5 minutes and diluted 1:20 in water. For PCR, 1 μl of the diluted DNA was amplified under the following conditions: Denature: 96° C. for 4.5 min; 45 cycles: 96° C. for 30 sec; 63° C. for 1 min; 72° C. for 1 min; Extension: 72° C. for 5 min; 4° C. hold.

[0556] The following primer sets are used for genotyping:

HBMMCBA:
5′primers 296 bp fragment
(SEQ ID NOS: 751-752 respectively)
Forward:
5′-GCT TCT GGC GTG TGA CCG GCG-3′
Reverse:
5′-GCC GCACAG CGC CAG CAG CAG C-3′
3′primers: 400 bp fragment
(SEQ ID NOS: 753-754 respectively)
Forward:
5′-CAC CCA CGC CCC ACA GCC AGT A-3′
Reverse:
5′-ATT TGC CCT CCC ATA TGT CCT TCC-3′
HBMMTIC:
5′primers: 382 bp fragment
(SEQ ID NOS: 755-756 respectively)
Forward:
5′-TTC CTC CCA GCC CTC CTC CAT CAG-3′
Reverse:
5′-GCC GCA CAG CGC CAG CAG CAG C-3′
3′primers: 524 bp fragment
(SEQ ID NOS: 757-758 respectively)
Forward:
5′-GAA TGG CGC CCC CGA CGA C-3′
Reverse:
5′-GCT CCC ATT CAT CAG TTC CAT AGG-3′

[0557] 21.6.7 Confirmation of Genotype by Southern Analysis

[0558] Mouse genomic DNA was digested with EcoRI and probed with a 1.0 kb SalI-BamHI restriction fragment from the Zmax1 cDNA. The probe hybridizes to a 5 kb fragment in transgene positive animals.

[0559] 21.7 Phenotyping

[0560] Both in vivo and ex vivo assays are used to evaluate the phenotype in transgenic mice. Two strains of wild-type mice, namely C57BL/6 and 129 SvEv, are studied to provide control data for phenotypic evaluation in transgenic and gene-targeted mice. In addition, non-transgenic littermate animals are used as controls.

[0561] 21.7.1 In vivo Analysis

[0562] Spinal bone mineral content (BMC) and bone mineral density (BMD) measurements performed at Creighton University (Omaha, Nebr.) were made by DXA using a Norland Instruments densitometer (Norland XR2600 Densitometer, Dual Energy X-ray Absorptiometry, DXA). Spinal BMC and BMD at other locations used the machinery available. There are estimated to be 800 DXA machines currently operating in the U.S. Most larger cities have offices or imaging centers which have DXA capabilities, usually a Lunar or Hologic machine. Each location that provided spine BMC and BMD data included copies of the printouts from their machines to provide verification that the regions of interest for measurement of BMD have been chosen appropriately. Complete clinical histories and skeletal radiographs were obtained.

[0563] The HBM phenotype (and HBM like phenotype which is also included when discussing the EBM phenotype) in human and animal subjects, preferably humans, can be described using criteria such as: very high spinal BMD; a clinical history devoid of any known high bone mass syndrome; and skeletal radiographs showing a normal shape of the appendicular skeleton.

[0564] pDXA:. Wild-type and transgenic mice are anesthetized, weighed and whole-body X-ray scans of the skeleton generated using the LUNAR small animal PIXImus device. Scans are begun when the mice are weaned (i.e., at 3 weeks of age) and repeated at 2 week intervals. Wild-type animals are scanned at 3, 5, 7, 9, 11, 13, 15, 17, 19, 21, 23, 27, and 29 weeks. Scanning of transgenic animals would be performed for periods up to 17 weeks. Scans are analysed for BMD (bone mineral density), BMC (bone mineral content), TTM (total tissue mass), and % fat for various body regions.

[0565] Faxitron radiographs: Following pDXA scanning of anesthetized animals, an additional X-ray was taken using a Faxitron device allowing measurement of bone size.

[0566] Calcein labeling: Animals are dosed with 15 mg/kg calcein intraperitoneally on two consecutive occasions. The first dose was given 9 days before euthanasia and the second given 2 days before euthanasia allowing measurement of bone formation rate.

[0567] 21.7.2 Ex vivo Analysis

[0568] RNA isolation Total RNA was isolated from tibia and other tissues using TRIzol® to determine mRNA expression.

[0569] pQCT: The right femur was cleaned of soft tissue and stored in 70% ethanol for determination of total and trabecular density of the distal metaphysis and cortical density of the mid-shaft.

[0570] MicioCT: The right femur was used to determine trabecular indices of the distal metaphysis.

[0571] Histology: The right femur was used to determine bone area and static and dynamic parameters of the distal metaphysis.

[0572] Bending strength: The left femur was cleaned of soft tissue and stored at −20° C. prior to analysis of 3-point bending strength of the mid-shaft.

[0573] Compressive strength of vertebra: The entire spine was removed from T10-L6-7. Soft tissue was left on and the spine frozen at −20° C. until analysis. Compressive strength was measured at the L5 vertebra.

[0574] Serum: Animals are euthanized and serum prepared from blood to measure total cholesterol, triglycerides, osteocalcin and other biochemical markers.

[0575] Lysis: Examples include immunocytochemistry, such as in situ hybridization of osteogenic markers and TUNNEL staining of cells undergoing apoptosis.

[0576] 21.8 Results

[0577] 21.8.1. Confirmation of Expression from Transgenic Plasmid Constructs

[0578] The HBM (HBMMCBA and HBMMTIC) and wild-type (Zmax1 WTCBA and Zmax1 WTTIC) plasmid constructs were transiently transfected into HOB-02-02 cells, which have a very low endogenous level of Zmax1 (LRP5) expression. Two days after transfection, RNA was isolated and TaqMan® quantitative RT-PCR was performed to determine the mRNA levels of Zmax1/HBM in the cells. To control for contaminating plasmid DNA, PCR was performed with or without the prior RT step, in the absence of the RT step, only very low levels of Zmax1/HBM MRNA were detected. However, with the RT step, a 1000-fold increase in HBM and Zmax1 mRNA was observed in cells transfected with CMVbActin-promoter constructs as compared to those′ transfected with the CMV-b-Galactosidase control. The type I collagen promoter constructs showed approximately 10-fold increases in HBM and Zmax1 mRNAs, which is consistent with the weaker nature of this promoter compared to the CMVβActin promoter. See FIG. 17.

[0579] 21.8.2 Species Specific TaqMan® Reagents for HBM/Zmax1 Expression

[0580] Species specific TaqMan® primer and probe sets for Zmax1/HBM were developed. In a series of experiments using HOB cells and mouse MC-3T3-E1 osteoblastic cells, Zmax1/HBM mRNA was measured in a mouse background, and vise versa. These reagents useful for the detection and quantization of species-specific expression. As demonstrated in FIG. 18, the primer sets are species specific in the mouse and human cell lines. Further, FIG. 19 demonstrates the quantitative measurement of human Zmax1 RNA in a background of mouse RNA. These TaqMan® sets can be used to determine the levels of human or mouse HBM or Zmax1 (or other HBM-like variant) message that are being expressed in the mouse transgenic lines.

[0581] The species-specific TaqMan® reagents are novel tools for the characterization of both is endogenous Zmax1 mRNA levels and human Zmax1/HBM mRNA levels in the transgenic mouse tissues. These tools have several advantages over other conventional methods, such as Northern hybridization and standard RT-PCR. Some of these advantages are as follows: (1) specificity, since only a small region (<100 bps) is amplified primers and probes are chosen to sequence regions predicted to have no or minimal cross-reactivity; (2) speed, since the procedure is less labor intensive; (3) accuracy, since it is truly quantitative; and (4) sensitivity, since it requires only small amounts of starting material (i.e., RNA) and the signal-to-noise ratio is high. These advantages are especially important for analyzing mRNA levels in bone, because it is difficult to obtain large amounts of RNA from bone. Thus, the primer sets developed for TaqMan® analysis of a HBM and Zmax I expression are important embodiments of the present invention. One skilled in the art will recognize that the primers described here are preferred embodiments; modifications such as extension or truncation of a primer or base substitution are encompassed by the present invention so long as the resultant nucleic acid continues to perform substantially the same function.

[0582] 21.8.3 HBM Expression in Transgenic Mice

[0583] Eight transgenic founder animals were produced for the CMVbActin (HBMMCBA) construct and a breeding program initiated to establish lines. Expression of mRNA determined by TaqMan® analysis, shown in FIG. 20, showed variable levels of bone expression in 4 lines. In tibia, expression levels (relative to endogenous Zmax1 (LRP5) in HOB-03-C5 cells) showed the following range: line 18 (x10-11 fold); line 2 (x7-10 fold); line 13 (x1-2 fold) and line 28 (x1 fold). Expression was also detected in other tissues as expected based on the known activity of the promoter. For lines 2 and 13, the highest levels of HBM expression were found in the heart. A TaqMan® genotyping assay will screen for potential homozygous animals.

[0584] Six transgenic founder animals were produced for the type I collagen (HBMMTIC) construct, and a breeding program initiated to establish lines. Expression of mRNA was found in two lines initially tested. In line 19, expression was 7-8 fold and 19-20 fold greater than Zmax1 in HOB-03-C5 cells in tibia and femur, respectively. In line 35,a low level of expression was detected in tibia and femur.

[0585] 21.9 In vivo pDXA in HBM Transgenic Mice

[0586] 21.9.1 HBMMCBA Construct

[0587] Initial analysis of limited numbers of mice, illustrated in FIG. 21(A-C), at the 5 week and 9 week time-points showed that one line tested to date had greater BMD values compared to control. At 5 weeks, HBMMCBA line 2 (n=11) BMD in femur, spine and total body was 21%, 24% and 10% greater respectively, than wild-type control. At 9 weeks (n=3), these increases in BMD amounted to 19%, 32% and 12%, respectively.

[0588] 21.9.2 HBMMTIC Construct

[0589] Analysis of limited numbers of mice, illustrated in FIG. 21(D-F), at the 5 week and 9 week time points showed that two lines tested to date had greater BMD values as compared to control. At 5 weeks, HBMMTIC line 19 (n=5) BMD in femur, spine and total body was 63%, 70% and 41% greater respectively than the wild-type control. At 9 weeks (n=2), these increases in BMD amounted to 52%, 64% and 37% respectively.

[0590] At 5 weeks, HBMMTIC line 35 (n=1) BMD in femur, spine and total body was 4%, 47% and 6% greater, respectively than the wild-type control. At 9 weeks (n=3), these increases in BMD amounted to 32%, 43% and 18% respectively.

[0591] These results indicate that three lines analyzed to date show evidence for a high bone mass phenotype. There appeared to be no obvious correlation between levels of mRNA expression and BMD phenotype from the limited numbers of lines and animals studied to date. For example, HBMMCBA line 2 and HBMMTIC line 19 have similar levels of HBM mRNA in tibia, but the phenotype is more evident in line 19. Also, HBMMTIC line 35 shows a very low level of expression when compared to HBMMCBA line 2, but HBMMTIC line 35 appears to have a stronger phenotype. These observations point to possible differences in cellular expression that may impact the phenotype.

[0592] Overall, the BMD results from the transgenic mice show similarities in magnitude to the phenotype observed in the HBM affected kindred (Johnson et al., 1997, Am. J. Hum. Genetics, 60:1326-1332). For example, spinal BMD measured in affected individuals is approximately 34-63% greater than non-affected family members. The data for spinal BMD from the transgenic animals ranges from ˜30-70% greater than normal at 9 weeks of age.

[0593] 21.9.3 Ex vivo Analysis of Transgenic Mice

[0594] In order to further examine increases in bone density that were detected in select transgenic lines through monitoring of the animals by non-invasive bone imaging, necropsies were performed on animals of these lines at 5 and 9 weeks of age for direct bone densitometric and histologic analysis. The left femur was isolated, cleaned and positioned in an XCT Research peripheral Quantitative Computed Tomograph (pQCT; Stradtec Medizintechnik, Pforzheim, Germany). The distal end of the femur was located and pQCT scarring was initiated 2.5 mm proximal from this point for total and trabecular measurements. The pQCT scan for cortical measurements was initiated 3.5 mm proximal from the first scan (i.e., 6 mm proximal from the distal end). The pQCT scans were 0.5 mm thick, had a voxel (i.e., three dimensional pixel) size of 0.07 mm, and consisted of 360 projections through the slice. After the scans were completed, the images were displayed on the monitor and a region of interest, including the entire femur for each scan, was outlined. The soft tissue was automatically removed using an iterative algorithm, and the density of the remaining bone (total density) in the first slice was determined. The outer 55% of the bone was then peeled away in a concentric spiral and the density of the remaining bone (trabecular density) of the first slice was reported in mg/cm³. In the second slice, the boundary between cortical and trabecular bone was determined using an iterative algorithm, and the density of the cortical bone was determined.

[0595] Analysis of Line 2 F1 CMVbActin-HBM 5 week old transgenic animals revealed that total density, trabecular density and cortical density, were 20%, 37% and 4% higher, respectively, in the transgenic male mice versus the non-transgenic males. In-5 week old Line 19 type I collagen-HBM transgenic males, an even more dramatic increase in bone density over their non-transgenic littermates was evident. Total density, trabecular density and cortical density were 53%, 104% and 5% higher, respectively. In the Line 19 animals, the phenotype was found to be maintained at 9 weeks of age. with total, trabecular and cortical bone density being 44%, 101% and 6% higher than the non-transgenic littermates. At 17 weeks, total and trabecular density were increased 46%, 202%, respectively. The effects on the total trabecullar parameters in line 19 at all three time points were statistically sigiuficantly higher (p<0.001). A somewhat different pattern of bone phenotypic expression was evident from males of type I collagen-HBM transgenic Line 35. At 5 weeks of age total, trabecular and cortical density were only marginally higher. (7%, 4% and 4%, respectively). However, at 9 weeks of age a clear and statistically significant (P<0.05, 0.005, and 0.001 respectively) increase in these parameters became evident (i.e., 25%, 37% and 4%, respectively). The occurrence of different patterns of age-related expression of the phenotype is not unexpected, particularly with the “bone specific” type I collagen transgene, which is influenced by stage of bone cell differentiation. Both Line 2 and Line 19 animals at 5 weeks of age express comparable levels of HBM mRNA in tibia samples, and these levels are significantly greater (>7-8-fold) than other lines that show no apparent bone phenotype at this age. Line 19, which is driven by the type I collagen promoter, unlike line 2, shows very low expression of the transgene in tissues other than bone. At 5 weeks of age, Line 35 animals show low level expression in bone and none in other tissues. Immunohistochemistry of calvarial bone sections using an HBM/Zmax1 specific antibody reveals much more intense staining in bone cells of transgenic animals from Lines 2 and 19 at 5 weeks of age and from Line 35 at 9 weeks of age versus their non-transgenic littermates.

[0596] The findings revealed by pQCT analysis were further examined under greater resolution using μCT instrumentation (Scanco). The femur was positioned such that the region being imaged includes the distal end of the femur extending approximately 4 mm proximally with the view being perpendicular to the axis of the articulating cartilage. The reference line for beginning the μCT measurement was placed to minimally overlap the growth plate and extends proximally for 200 scan slices (9 mm thickness). After completing the μCT measurement, the first slice in which the condyles have fully merged was identified. A region of interest was outlined to include a maximum amount of the trabecular space, while excluding the cortex. For the first thirty slices, regions of interest were drawn every five slices and merged. For the remaining 105 slices, regions of interest were drawn every 10-20 slices. The more regular the trabecular space, the less frequently a region of interest needed to be drawn. Each region of interest was merged with its predecessor after it was drawn. After regions of interest had been established for all 135 slices, three dimensional evaluation was performed using a threshold setting of 350.

[0597] The increased bone densities identified by pQCT were confirmed and extended by μCT to include elements of bone architecture. In the Line 2 transgenic animals, μCT bone volume/total volume, connectivity density and trabecular thickness were 50%, 83% and 12% higher, respectively. Both the connectivity density and trabecular thickness indices suggest that the increased density is also associated with increased structural strength. Bone surface/bone volume was lower by 17% in the transgenic males, which may suggest that there may be fewer resorptive surfaces and pits. The trabecular bone response was further confirmed by. histological evaluation of non-decalcified, Goldner's stained sections, which revealed 36% greater bone mineral area in the distal femoral metaphysis of the transgenic males. Dynamic histomorphometric analysis revealed that a substantial increase in bone mineral apposition rate (+100%), as determined by calcein double labeling, may be partially responsible for the increased bone in the transgenics. The dramatic effects evident by pQCT on trabecular bone in Line 19 were supported by μCT evaluation where bone volume/total volume, trabecular number, trabecular thickness and connectivity density were found to be 130%, 45%, 30% and 121% higher, respectively, in,the transgenic males. As seen in Line 2, the bone surface/bone volume was lower in the transgenic males (−36%). All of these effects were statistically significant with p<0.01. The bone phenotype seen at 5 weeks of age in Line 19 was maintained in 9 week-old animals where bone volume/total volume, trabecular number and connectivity density were 125%, 38% and 110% higher than in the non-transgenic littemiates.

[0598] μCT analysis of the Line 35 transgenics revealed a somewhat different pattern than the other two lines. In contrast to only modestly increased density indicated by pQCT in 5 week-old females from Line 35, a statistically significant effect (p<0.01) was seen with mCT, which has greater image resolution and encompasses a larger volumetric sample. Bone is volume/total volume, trabecular thickness and connectivity density were 35%, 9% and 27% higher. A similar result was seen in 5 week-old males from Line 35 where bone volume/total volume and connectivity density increases of 37% and 45%, respectively, were evident by μCT analysis, where only slight increases were revealed by pQCT. The differences between the Line 35 transgenic males and their non-transgenic littermates appeared to increase with age such that statistically significant increases in total density (25%) and trabecular density (37%) were evident by pQCT at 9 weeks of age. The μCT results support an age-related divergence in bone phenotype in this line and show that differences between transgenic and non-transgenic animals, in terms of bone volume/total volume and connectivity density, had nearly doubled those seen at 5 weeks to 70% and 83%, respectively. The bone volume increases seen in the transgenic animals is in agreement with a significant increase in this parameter that was detected in a bone biopsy sample from an adult male affected member of the HBM kindred. The other parameters that were found to be affected in the transgenic lines may reflect changes that lead to an increased peak/adult bone mass, which in this strain of mice occurs between the ages of 17-20 weeks

[0599] The bone density and bone architectural changes seen in the over-expressing transgenic lines would suggest potentially greater bio-mechanical strength. This was tested directly by evaluating 3-point bending strength of femurs from 5 week old Line 19 males. The femora were cleaned of soft tissue and the femoral length measured using a digital caliper. Periosteal and endosteal circumferences, as well as cortical thickness, were measured 6 mm from the distal end of the bone using pQCT. The femur was then placed on a fixture so that the center of mid-shaft was at an equal distance from fixed supports located 5 mm apart. The cross bar of an Instron 5543 load device was placed over the mid-shaft and a force applied at a speed of 1 mm/minute until fracture occurred. A force vs. displacement curve was generated and peak load determined using Instron Merlin software. There was a 75% increase (p<0.01) in strength that appears to be due to an increase in periosteal circumference leading to an increase in cortical thickness. Thus, it appears that the changes in bone density and bone geometry, as seen in the HBM transgenic animals, do translate into increases in biomechanical strength.

[0600] In view of the association of HBM/Zmax1 within the class of LDL related receptor proteins, it was of interest to determine whether the mutation night affect lipid profiles. Indeed, lipid studies in the HBM kindred (i.e., 8 affected and 7 unaffected members) have revealed that triglyceride and VLDL levels are statistically lower in the affected members. Serum samples from the transgenic lines were analyzed on a Hitachi 911 instrument using Boehringer Mannheim (for Cholesterol) and Roche (for triglycerides) reagents. The cholesterol was measured via o-quinone imine dye (which is formed following enzymatic reactions with cholesterol) photometrically at 505 nm at 37° C. Enzymatic methods for triglyceride measurements are based on determination of the glycerol part of triglyceride after hydrolysis of triglycerides and fatty acids. The end dye product of enzymatic reaction was measured at 505 nm. In 5 week old male Line 2 transgenics, although serum cholesterol was only slightly reduced, serum triglyceride levels were reduced by 26% in the transgenics versus their non-transgenic littermates. In a limited sample of Line 2 animals at 9 weeks of age, triglyceride levels remained 20% lower. Similarly, at 5 weeks of age triglyceride levels in male transgenics from Line 19 were 32% lower. In contrast, at 5 weeks of age both male and female transgenics of Line 35 did not have lower triglyceride levels. The fact that the 5 week old Line 35 animals did have statistically greater bone volume/total volume suggests that the lipid change may not be directly related to the skeletal phenotype. This would appear to be supported by the fact that the Line 35 animals at 9 weeks of age had only slightly reduced triglyceride levels (11%) but exhibited substantially higher bone density than at 5 weeks of age. Due to the different levels and sites of expression of the transgene in these lines we can not rule out the possibility that serum lipid levels could serve as a surrogate marker for agents favorably affecting a bone phenotype through HBM/Zmax1.

[0601] These and other transgenic lines based on HBM or HBM-like genes will serve as valuable models for exploring the nature of bone homeostasis. Bone density in all species accommodates to its customary loading conditions. In the HBM kindred and in the transgenic lines, the sensor/effector systems of the skeleton appear to perceive greater load signals resulting in greater bone density. Experimental models have been established showing that increased bone loading can lead to increased bone density and that unloading or disuse leads to a loss of bone density. Evaluating the histological, biochemical and genetic responses of the skeleton of the transgenic animals in these experimental paradigms will yield much information regarding the sensor/effector system responsible for bone homeostasis. The application of the transgenic animals in other established models of altered bone turnover, including but not limited to steroid deficiency-induced osteopenia and aging-related osteopenia will provide further insight into the role of Zmax1 in bone homeostasis and the nature of the favorable changes induced by the HBM mutation.

[0602] 21.9.4 HBM Gene-Targeting

[0603] The Zmax1 KI/KO gene-targeting vector is electroporated into 129 SvEv, C57BL/6 ES and 129 ES cells. Restriction fragment length analysis of genomic DNA and sequencing of PCR amplified fragments can be used to identify gene targeted clones. The knock-in version of the gene-targeting vector allows for the introduction of the HBM mutation into the endogenous Zmax (LRP5) genomic locus with minimal impact on the mouse genome. It permits the production of the HBM protein in a more natural environment, i.e. not in an over-expression model such as the transgenic mice or transfected cell lines. The knock-out version of the gene-targeting vector was engineered to contain a transcriptional stop sequence that has the potential to result in loss of one functional LRP5 allele. Breeding heterozygous animals with this mutation would lead to the production of embryos homozygous for the null allele. In a different design of the gene-targeting vector, lox P sites could be positioned in such a way that would facilitate production of a conditional knock-out of the endogenous LRP5 gene. In the presence of Cre recombinase, a critical region of the LRP5 gene would be deleted in between the lox P sites, thus resulting in the potential loss of one functional allele. Animal breeding would then be used to create homozygotes with a null allele. Other recombinase enzyme systems, such as flp recombinase in combination with cognate frt sites, could be used to create the deletion. The recombinase could be administered in a number of ways as described earlier, including plasmid injection into embryos and use of transgenic animals expressing Cre. The promoter used to drive expression of Cre could be chosen in a manner that would result in ubiquitous or tissue-specific deletion of the LRP5 gene thus resulting in a conditional knockout. In a further embodiment expression of the Cre enzyme itself could be made conditional using inducible systems such as GeneSwitch and Tetracycline paradigms.

[0604] 21.9.5 1 Uses of Transgenic Animals and Cells

[0605] The transgenic animals and cells of the present invention are useful tools in methods for identifying surrogate markers for the HBM phenotype. The surrogate markers provided by the present invention are also useful tools for the assessment and screening of prospective treatments. Individuals carrying the HBM gene have elevated bone mass. The HBM gene causes this phenotype by altering the activities, levels, expression patterns, and modification states of other molecules involved in bone development. Using a variety of established techniques, it is possible to identify molecules, preferably proteins or mRNAs, whose activities, levels, expression patterns, and modification states are different between systems containing the Zmax1 gene and systems containing the HBM gene. Such systems can be, for example, cell-free extracts, cells, tissues or living organisms, such as mice or humans. For a mutant form of Zmax1, a complete deletion of Zmax1, mutations lackcing the extracellular or intracellular portion of the protein, or any other mutation in the Zmax1 gene may be used. It is also possible to use expression of antisense Zmax1 RNA or oligonucleotides to inhibit production of the Zmax1 protein. For a mutant form of HBM, a complete deletion of HBM, mutations lacking the extracellular or intracellular portion of the HBM protein, or any other mutation in the HBM gene may be used. It is also possible to use expression of antisense HBM RNA or oligonucleotides to inhibit production of the HBM protein.

[0606] Molecules identified by comparison of Zmax1 systems and HBM systems can be used as surrogate markers in pharmaceutical development or in diagnosis of human or animal bone disease. Alternatively, such molecules may be used in treatment of bone disease. See, Schena et al., 1995 Science, 270: 467-70.

[0607] For example, a transgenic mouse carrying the HBM gene or HBM-like variant in the mouse homologue locus is constructed. A mouse of the genotype HBM/+ is viable, healthy and has elevated bone mass. To identify surrogate markers for elevated bone mass, HBM/+ (i.e., heterozygous) and isogenic +/+ (i.e., wild-type) mice are sacrificed. Bone tissue mRNA is extracted from each animal, and a “gene chip” corresponding to mRNAs expressed in the +/+ individual is constructed. mRNA from different tissues is isolated from animals of each genotype, reverse-transcribed, fluorescently labeled, and then hybridized to gene fragments affixed to a solid support. The ratio of fluorescent intensity between the two populations is indicative of the relative abundance of the specific mRNAs in the +/+ and HBM/+ animals. Alternatively, mRNA may be isolated from wild-type and transgenic animals. cDNA prepared from these samples is transcribed in vitro to obtain labeled mRNA for use on custom made or commercially available gene array chips such as are manufactured by Affymetrix. Sets of genes with altered expression as a function of phenotype may be identified be a variety of routine computational analyses. Genes encoding mRNA over- and under-expressed relative to the wild-type control are candidates for genes coordinately regulated by the HBM gene or HBM-like gene.

[0608] One standard procedure for identification of new proteins that are part of the same signaling cascade as an already-discovered protein is as follows. Cells are treated with radioactive phosphorous, and the already-discovered protein is manipulated to be more or less active. The phosphorylation state of other proteins in the cell is then monitored by polyacrylamide gel electrophoresis and autoradiography, or similar techniques. Levels of activity of the known protein may be manipulated by many methods, including, for example, comparing wild-type mutant proteins using specific inhibitors such as drugs or antibodies, simply adding or not adding a known extracellular protein, or using antisense inhibition of the expression of the known protein (Tamura et al., 1998 Science, 280: 1614-7; Meng, 1998 EMBO J., 17: 4391-403; Cooper et al., 1982 Cell 1: 263-73).

[0609] In another example, proteins with different levels of phosphorylation are identified in TE85 osteosarcoma cells expressing either a sense or antisense cDNA for Zmax1. TE85 cells normally express high levels of Zmax1 (Dong et al., 1998 Biochem.& Biophys. Res. Comm., 251: 784-90). Cells containing the sense construct express even higher levels of Zmax1, while cells expressing the antisense construct express lower levels. Cells are grown in the presence of ³²P, harvested, lysed, and the lysates run on SDS polyacrylamide gels to separate proteins, and the gels subjected to autoradiography (Ausubel et al., Current Protocols in Molecular Biology, John Wiley & Sons (1997)). Bands that differ in intensity between the sense and antisense cell lines represent phosphoproteins whose phosphorylation state or absolute level varies in response to levels of Zmax1. As an alternative to the ³²P-labeling, unlabeled proteins may be separated by SDS-PAGE and subjected to immunoblotting, using the commercially available anti-phosphotyrosine antibody as a probe (Thomas et al., .1995 Nature, 376: 267-71). As an alternative to the expression of antisense RNA, transfection with chemically modified antisense oligonucleotides can be used (Woolf et al., 1990 Nucleic Acids Res., 18: 1763-9).

[0610] Many bone disorders, such as osteoporosis, have a slow onset and a slow response to treatment. It is therefore useful to develop surrogate markers for bone development and mineralization. Such markers can be useful in developing treatments for bone disorders, and for diagnosing patients who may be at risk for later development of bone disorders. Examples of preferred markers are N- and C-terminal telopeptide markers described, for example, in U.S. Pat. Nos. 5,455,179, 5,641,837 and 5,652,112, the disclosures of which are incorporated by reference herein in their entirety. In the area of HIV disease, CD4 counts and viral load are useful surrogate markers for disease progression (Vlahov et al., 1998 JAMA, 279(1): 35-40). There is a need for analogous surrogate markers in the area of bone disease.

[0611] A surrogate marker can be any characteristic that is easily tested and relatively insensitive to non-specific influences. For example, a surrogate marker can be a molecule such as a protein or mRNA in a tissue or in blood serum. Alternatively, a surrogate marker may be a diagnostic sign such as sensitivity to pain, a reflex response or the like.

[0612] In yet another example, surrogate markers for elevated bone mass are identified using a pedigree of humans carrying the HBM gene or HBM-like gene. Blood samples are withdrawn from three individuals that carry the HBM gene or HBM-like gene, and from three closely related individuals that do not. Proteins in the serum from these individuals are electrophoresed on a two dimensional gel system, in which one dimension separates proteins by size, and another dimension separates proteins by isoelectric point (Epstein et al., 1996 Electrophoresis 17: 1655-70). Spots corresponding to proteins are identified. A few spots are expected to be present in different amounts or in slightly different positions for the HBM individuals compared to their normal relatives. These spots correspond to proteins that are candidate surrogate markers. The identities of the proteins are determined by microsequencing, and antibodies to the proteins can be produced by standard methods for use in diagnostic testing procedures. Diagnostic assays for HBM proteins or other candidate surrogate markers include using antibodies described in this invention and a reporter molecule to detect HBM in human body fluids, membranes, bones, cells, tissues or extracts thereof. The antibodies can be labeled by joining them covalently or noncovalently with a substance that provides a detectable signal. In many scientific and patent literature, a variety of reporter molecules or labels are described including radionuclides, enzymes, fluorescent, chemiluminescent or chromogenic agents (U.S. Pat. Nos. 3,817,837; 3,850,752; 3,939,350; 3,996,345; 4,277,437; 4,275,149; and 4,366,241). The transgenic or genetically modified animals can also serve in a method for surrogate marker identification.

[0613] Using these antibodies, the levels of candidate surrogate markers are measured in normal individuals and in patients suffering from a bone disorder, such as osteoporosis, osteoporosis pseudoglioma, Engelmann's disease, Ribbing's disease, hyperphosphatasemia, Van Buchem's disease, melorheostosis, osteopetrosis, pychodysostosis, sclerosteosis, osteopoikilosis, acromegaly, Paget's disease, fibrous dysplasia, tubular stenosis, osteogenesis imperfecta, hypoparathyroidism, pseudohypoparathyroidism, pseudopseudohypoparathyroidism, primary and secondary hyperparathyroidism and associated syndromes, hypercalciuria, medullary carcinoma of the thyroid gland, osteomalacia and other diseases. Techniques for measuring levels of protein in serum in a clinical setting using antibodies are well established. A protein that is consistently present in higher or lower levels in individuals carrying a particular disease or type of disease is a useful surrogate marker.

[0614] A surrogate marker can be used in diagnosis of a bone disorder. For example, consider a child that presents to a physician with a high frequency of bone fracture. The underlying cause may be child abuse, inappropriate behavior by the child, or a bone disorder. To rapidly test for a bone disorder, the levels of the surrogate marker protein are measured using the antibody described above.

[0615] Levels of modification states of surrogate markers can be measured as indicators of the likely effectiveness of a drug that is being developed. It is especially convenient to use surrogate markers in creating treatments for bone disorders, because alterations in bone development or mineralization may require a long time to be observed. For example, a set of bone mRNAs, termed the “HBM-inducible mRNA set” is found to be over-expressed in HBM/+ mice as compared to +/+ mice, as described above. Expression of this set can be used as a surrogate marker. Specifically, if treatment of +/+ mice with a compound results in over-expression of the HBM-inducible mRNA set, then that compound is considered a promising candidate for further development.

[0616] This invention is particularly useful for screening compounds by using the Zmax1 or HBM protein or HBM-like proteins or binding fragments thereof in any of a variety of drug screening techniques.

[0617] The Zmax1 or HBM protein or fragment employed in such a test may either be free in solution, affixed to a solid support, or borne on a cell surface. One method of drug screening utilizes eukaryotic or prokaryotic host cells which are stably transformed with recombinant nucleic acids expressing the protein or fragment, preferably in competitive binding assays. Such cells, either in viable or fixed form, can be used for standard binding assays. One may measure, for example, for the formation of complexes between a Zmax1 or HBM protein or fragment and the agent being tested, or examine the degree to which the formation of a complex between a Zmax1 or HBM protein or fragment and a known ligand is interfered with by the agent being tested.

[0618] Thus, the present invention provides methods of screening for drugs comprising contacting such an agent with a Zmax1 (LRP5) or HBM protein or fragment thereof and assaying (i) for the presence of a complex between the agent and the Zmax1 or HBM protein or fragment, or (ii) for the presence of a complex between the Zmax1 or HBM protein or fragment and a ligand, by methods well known in the art. In such competitive binding assays the Zmax1 or HBM protein or fragment is typically labeled. Free Zmax1 or HBM protein or fragment is separated from that present in a protein:protein complex, and the amount of free (i.e., uncomplexed) label is a measure of the binding of the agent being tested to Zmax1 or HBM or its interference with Zmax1 or HBM: ligand binding, respectively.

[0619] Another technique for drug screening provides high throughput screening for compounds having suitable binding affinity to the Zmax1 or HBM proteins and is described in detail in WO 84/03564. Briefly stated, large numbers of different small peptide test compounds are synthesized on a solid substrate, such as plastic pins or some other surface. The peptide test compounds are reacted with Zmax1 or HBM proteins and washed. Bound Zmax1 or HBM protein is then detected by methods well known in the art. Purified Zmax1 or HBM can be coated directly onto plates for use in the aforementioned drug screening techniques. However, non-neutralizing antibodies to the protein can be used to capture antibodies to immobilize the Zmax1 or HBM protein on the solid phase.

[0620] This invention also contemplates the use of competitive drug screening assays in which neutralizing antibodies capable of specifically binding the Zmax1 or HBM protein compete with a test compound for binding to the Zmax1 or HBM protein or fragments thereof. In this manner, the antibodies can be used to detect the presence of any peptide that shares one or more antigenic determinants of the Zmax1 or HBM protein.

[0621] A further technique for drug screening involves the use of host eukaryotic cell lines or cells (such as described above) that have a nonfunctional Zmax1 or HBM gene. These host cell lines or cells are defective at the Zmax1 or HBM protein level. The host cell lines or cells are grown in the presence of drug compound. The rate of growth of the host cells is measured to determine if the compound is capable of regulating the growth of Zmax1 or HBM defective cells.

[0622] The goal of rational drug design is to produce structural analogs of biologically active proteins of interest or of small molecules with which they interact (e.g., agonists, antagonists, inhibitors) in order to fashion drugs which are, for example, more active or stable forms of the protein, or which, e.g., enhance or interfere with the function of a protein in vivo. See, e.g., Hodgson, 1991 Bio/Technology, 9: 19-21. In one approach, one first determines the three-dimensional structure of a protein of interest (e.g., Zmax1 or HBM protein) or, for example, of the Zmax1- or HBM-receptor or ligand complex, by x-ray crystallography, by computer modeling or most typically, by a combination of approaches. Less often, useful information regarding the structure of a protein may be gained by modeling based on the structure of homologous proteins. An example of rational drug design is the development of HIV protease inhibitors (Erickson et al., 1990 Science, 249: 527-33). In addition, peptides (e.g., Zmax1 or HBM protein) are analyzed by an alanine scan (Wells, 1991 Methods in Enzymol., 202: 390-411). In this technique, an amino acid residue is replaced by Ala, and its effect on the peptide's activity is determined. Each of the amino acid residues of the peptide is analyzed in this manner to determine the important regions of the peptide.

[0623] It is also possible to isolate a target-specific antibody, selected by a functional assay, and then to solve its crystal structure. In principle, this approach yields a pharmacore upon which subsequent drug design can be based. It is possible to bypass protein crystallography altogether by generating anti-idiotypic antibodies (anti-ids) to a functional, pharmacologically active antibody. As a mirror image of a mirror image, the binding site of the anti-ids would be expected to be an analog of the original receptor. The anti-id-could then be used to identify and isolate peptides from banks of chemically or biologically produced banks of peptides. Selected peptides would then act as the pharmacore.

[0624] Thus, one may design drugs which have, e.g., improved Zmax1 or HBM protein activity or stability or which act as inhibitors, agonists, antagonists, etc. of Zmax1 or HBM protein activity. By virtue of the availability of cloned Zmax1 or HBM sequences, sufficient amounts of the Zmax1 or HBM protein may be made available to perform such analytical studies as X-ray crystallography. In addition, the knowledge of the Zmax1 or HBM protein sequence provided herein will guide those employing computer modeling techniques in place of, or in addition to X-ray crystallography.

[0625] Identified drug candidates (known as “leads”) may be further studied by use of transgenic animals. The transgenic animals of the present invention are useful for creating an animal model of bone density modulation which may be used to test and refine drug leads. The transgenic animals described above represent a single example of the Zmax1 and HBM or HBM-like transgenic animals contemplated herein. One skilled in the art is aware of variations and the considerations which will be routinely applied in modifying the present invention to a specific purpose. Examples of the development of transgenic animal models are given for example in Strategies in Transgenic Animal Science (1995, Monastersky and Robl Eds., Washington, D.C.: American Society for Microbiology) and references therein which are all incorporated herein by reference in their entirety.

[0626] As an example, at least two groups of transgenic animals can be created as described, so that one group expresses HBM and another group expresses Zmax1. These animals can be treated with the candidate drug for some time spanning from a few days to the remainder of the animal's life-span. The animals are monitored for changes in bone mass and/or surrogate markers for the HBM phenotype. The transgenic animals used in such a study may express human HBM protein and Zmax1 protein or the homologous HBM and Zmax1 proteins defined for each species or variants thereof. Expression may be driven by a ubiquitous promoter or a bone specific promoter as would be known. It will be informative to compare groups of animals utilizing different promoters.

[0627] The transgenic animals of the method according to the present inventions may also comprise knock-in (KI) and/or knock-out (KO) animals, such as mice, which express HBM, Zmax1, or neither under the control of the animal's native promoter. Such animals may be created by homologous recombination in ES cells as described above (and elsewhere in the literature of the art such as, for example, U.S. Pat. Nos. 6,187,991 and 6,187,992 and references cited therein which are incorporated herein in their entirety). The experimental groups of transgenic animals treated with candidate drugs may be monitored by non-invasive means, by the monitoring of surrogate markers as described above, and/or by ex vivo analysis of bones from sacrificed animals at given time-points.

[0628] Likewise the effect of such treatments as dietary control (e.g. varying intake of vitamins, minerals, proteins, lipids, etc.), ovariectomy, direct administration of all or part of purified HBM or Zmax1 proteins, administration of antisense nucleotides, antibodies against Zmax1 or gene therapy in adults may be investigated by systematic administration of the treatment to transgenic animals according to the invention. Such treatments may include, administration of estrogens, tamoxifen, raloxifene, (or other selective estrogen modulators, SERMs), vitamin D analogs, calcitonin, cathepsin K inhibitors, statins (e.g. simvastatin, pravastatin, and lovastatin), bis-phosphonates, parathyroid hormone (PTH), bone morphogenetic proteins (BMP) as described in U.S. Pat. Nos. 6,190,880 and 5,866,364, and combinations of the above compounds.

[0629] In view of the homology between Zmax1 and LRP6 and to the LDL receptor and the further observations of markers for cardiac health being modulated in HBM subjects, it is an aspect of the present invention to use the novel research methods disclosed herein to screen known cardio-protective treatments for bone modulating effects. Thereby, the present invention provides therapeutic methods which are both cardio-protective and which improve bone quality. The models are useful for testing drugs and researching lipid modulation effects related to Zmax1, LRP6, HBM and HBM like proteins and nucleic acids.

[0630] The effect of various mutations of Zmax1, HBM and HBM-like genes may be investigated by creation of additional lines of transgenic animals according to the invention, wherein these animals comprise such mutations. By comparison of direct measures of bone development or surrogate markers, an embodiment of the invention provides a useful research tool for screening gene therapy reagents, candidate drug therapies, and elucidating molecular mechanisms of bone development modulation. One skilled in the art knows how to use the methods of the present invention to achieve these goals.

[0631] The present invention provides a method and useful research tools for testing prospective gene therapies. Transgenic knock-out mice are useful for testing prospective gene therapies. A transgenic knock-out animal such as a mouse is created as described above which does not express endogenous Zmax1 or HBM. A prospective gene therapy, such as intravenous injection of a recombinant replication-defective adenovirus encoding the human HBM protein driven by the CMVβActin promoter, is administered. Parameters of bone density and/or surrogate markers are monitored over time following therapy (Ishibashi et al., 1993 J. Clin. Invest. 92: 883-93) A TaqMan® primer set such as that described above may be used to measure expression of transgenic HBM. One skilled in the art knows alternative methods such as the Northern blot method. Comparison of treated and untreated animals both within and between groups of germ-line transgenic animals, knock-out (null allele) background, and wild-type endogenous Zmax1 background animals provides complementary controls for assessing the relative effectiveness of various modalities of gene therapy.

[0632] Uses for the transgenic animals models contemplated herein also include, but are not limited to: (1) sources for generating bone cell cultures from the calvaria of the transgenic animals to study bone cell (e.g., osteoblast and osteoclast) function and number; (2) models for studying the effects of estrogen loss by ovariectomizing (ovx) the transgenic animals; (3) models for testing mechanical loading on the bones and other stress/strength tests; (4). breeding models with which to breed to other genetically modified or naturally occurring mutant animals that display bone abnormalities; (Chipman et al., 1993 PNAS, 90: 1701-05; Phillips et al., 2000 Bone 27: 219-26; Kajkenova et al., 1997 J. Bone Min. Res. 12: 1772-79; Jilka et al., 1996 J. Clin. Invest. 97: 1732-40; Takahashi et al., 1994 Bone and Mineral 24: 245-55); (5) bone mis/disuse models to test the effects of weight bearing or gravity; (6) models for identifying and screening reagents which may or are known to modulate bone metabolism (e.g., PTH, estrogen, vitamin D analogs, bisphosphonates, statins, leptin, BMP, apoE); (7) models for investigating prospective treatments to improve fracture repair.

[0633] The Transgenic animal models can be analyzed using, but not limited to, such methods as bone densitometry by pDEXA, pQCT and microCT; histology, molecular marker analysis, apoptosis, cell proliferation, cell cycle, mineralization, serum biochemistry, transcriptional profiling, and the like.

[0634] 22. Methods of Use: Avian and Mammalian Animal Husbandry

[0635] The Zmax1 (LRP5) DNA and Zmax1 (LRP5) protein and/or the HBM DNA and HBM protein (or LRP6 or an HBM-like nucleic acid or protein as also contemplated herein) can be used for vertebrate and preferably human therapeutic agents and for avian and mammalian veterinary agents, including for livestock breeding. Birds, including, for example, chickens, roosters, hens, turkeys, ostriches, ducks, pheasants and quails, can benefit from the identification of the gene and pathway for high bone mass. In many examples cited in literature (for example, McCoy et al., 1996 Res. Vet. Sci., 60: 185-6), weakened bones due to husbandry conditions cause cage layer fatigue, osteoporosis and high mortality rates. Additional therapeutic agents to treat osteoporosis or other bone disorders in birds can have considerable beneficial effects on avian welfare and the economic conditions of the livestock industry, including, for example, meat and egg production.

[0636] 23. Methods of Use: Diagnostic Assays using Zmax1-Specific Oligonucleotides for Detection of Genetic Alterations Affecting Bone Development

[0637] In cases where an alteration or disease of bone development is suspected to involve an alteration of the Zmax1, LRP6, HBM or HBM-like gene, specific oligonucleotides may be constructed and used to assess the level of Zmax1 mRNA or HBM mRNA, respectively, in bone tissue or in another tissue that affects bone development.

[0638] For example, to test whether a person has the HBM gene, which affects bone density, polymerase chain reaction can be used. Two oligonucleotides are synthesized by standard methods or are obtained from a commercial supplier of custom-made oligonucleotides. The length and base composition are determined by standard criteria using the Oligo 4.0 primer Picking program (Wojchich Rychlik, 1992) or any suitable alternative. One of the oligonucleotides is designed so that it will hybridize only to HBM DNA under the PCR conditions used. The other oligonucleotide is designed to hybridize a segment of Zmax1 genomic DNA such that amplification of DNA using these oligonucleotide primers produces a conveniently identified DNA fragment. For example, the pair of primers CCAAGTTCTGAGAAGTCC (SEQ ID NO:32) and AATACCTGAAACCATACCTG (SEQ ID NO:33) will amplify a 530 base pair DNA fragment from a DNA sample when the following conditions are used: step 1 at 95° C. for 120 seconds; step 2 at 95° C. for 30 seconds; step 3 at 58° C for 30 seconds; step 4 at 72° C. for 120 seconds; where steps 2-4 are repeated 35 times. Tissue samples may be obtained from hair follicles, whole blood, or the buccal cavity.

[0639] The fragment generated by the above procedure is sequenced by standard techniques. Individuals heterozygous for the HBM gene will show an equal amount of G and T at the second position in the codon for glycine 171. Normal or homozygous wild-type individuals will show only G at this position. Similar routine procedures may be used to develop assays for other polymorphisms and variants according to the invention.

[0640] Other amplification techniques besides PCR may be used as alternatives, such as ligation-mediated PCR or techniques involving Q-beta replicase (Cahill et al., Clin. Chem., 37(9):1482-5 (1991)). For example, the oligonucleotides 5′-AGCTGCTCGTAGCTG TCTCTCCCTGGATCACGGGTACATGTACTGGACAGACTGGGT-3′(SEQ ID NO:34) and T5′-GAGACGCCCCGGATTGAGCGGGCAGGGATAGCTTATTCCCTGTGCCGCA TTACGGC-3′ (SEQ ID NO: 35) can be hybridized to a denatured human DNA sample, treated with a DNA ligase, and then subjected to PCR amplification using the primer oligonucleotides 5′-AGCTGCTCGTAGCTGTCTCTCCCTGGA-3′ (SEQ ID NO:36) and 5′-GCCGTAATGCGGCACAGGGAATAAGCT-3′ (SEQ ID NO:37). In the first two oligonucleotides, the outer 27 bases are random sequence corresponding to primer binding sites, and the inner 30 bases correspond to sequences in the Zmax1 gene. The T at the end of the first oligonucleotide corresponds to the HBM gene. The first two oligonucleotides are ligated only when hybridized to human DNA carrying the HBM gene, which results in the formation of an amplifiable 114 bp DNA fragment.

[0641] Products of amplification can be detected by agarose gel electrophoresis, quantitative hybridization, or equivalent techniques for nucleic acid detection known to one skilled in the art of molecular biology (Sambrook et al., Molecular Cloning: A Laboratory Manual, Cold Spring Harbor Laboratory, Cold Spring, N.Y. (1989)).

[0642] Other alterations in the Zmax1 gene or the HBM gene (or LRP6 or HBM-like nucleic acids, which are also contemplated herein) may be diagnosed by the same type of amplification-detection procedures, by using oligonucleotides designed to identify those alterations. These procedures can be used in animals as well as humans to identify alterations in Zmax1 or HBM that affect bone development.

[0643] Expression of Zmax1 or HBM in bone tissue may be accomplished by fusing the cDNA of Zmax1 or HBM, respectively, to a bone-specific promoter in the context of a vector for genetically engineering vertebrate cells. DNA constructs are introduced into cells by packaging the DNA into virus capsids, by the use of cationic liposomes, electroporation, or by calcium phosphate transfection. Transfected cells, preferably osteoblasts, may be studied in culture or may be introduced into bone tissue in animals by direct injection into bone or by intravenous injection of osteoblasts, followed by incorporation into bone tissue (Ko et al., 1996 Cancer Res. 56: 4614-9). For example, the osteocalcin promoter, which is specifically active in osteoblasts, may be used to direct transcription of the Zmax1 gene or the HBM gene. Any of several vectors and transfection methods may be used, such as retroviral vectors, adenovirus vectors, or vectors that are maintained after transfection using cationic liposomes, or other methods and vectors described herein.

[0644] Alteration of the level of functional Zmax1 protein or HBM protein affects the level of bone mineralization. By manipulating levels of functional Zmax1 protein or HBM protein, it is possible to affect bone development and to increase or decrease levels of bone mineralization. For example, it may be useful to increase bone mineralization in patients with osteoporosis. Alternatively, it may be useful to decrease bone mineralization in patients with osteopetrosis or Paget's disease. Alteration of Zmax1 levels or HBM levels can also be used as a research tool. Specifically, it is possible to identify proteins, mRNA and other molecules whose level or modification status is altered in response to changes in functional levels of Zmax1 or HBM. The pathology and pathogenesis of bone disorders is known and described, for example, in Rubin and Farber (Eds.), Pathology, 2nd Ed., S. B. Lippincott Co., Philadelphia, Pa. (1994).

[0645] A variety of techniques can be used to alter the levels of functional Zmax1 or HBM. For example, intravenous or intraosseous injection of the extracellular portion of Zmax1 or mutations thereof, or HBM or mutations thereof, will alter the level of Zmax1 activity or HBM activity, respectively, in the body of the treated human, animal or bird. Truncated versions of the Zmax1 protein or HBM protein can also be injected to alter the levels of functional Zmax1 protein or HBM protein, respectively. Certain forms of Zmax1 or HBM enhance the activity of endogenous protein, while other forms are inhibitory.

[0646] In a preferred embodiment, the HBM protein is used to treat osteoporosis, fracture, or other bone disorder. In a further preferred embodiment, the extracellular portion of HBM or fragment thereof (e.g., the Dkk binding domain) protein is used. This HBM protein may be optionally modified by the addition of a moiety that causes the protein to adhere to the surface of cells. The protein is prepared in a pharmaceutically acceptable solution and is administered by injection or another method that achieves acceptable pharmacokinetics and distribution.

[0647] In a second embodiment of this method, Zmax1, HBM, HBM variant, and/or LRP6 levels are increased or decreased by gene therapy techniques. To increase Zmax1 or HBM levels, osteoblasts or another useful cell type are genetically engineered to express high levels of Zmax1 or HBM as described above. Alternatively, to decrease Zmax1 or HBM levels, antisense constructs that specifically reduce the level of translatable Zmax1 or HBM mRNA can be used. In general, a tissue-nonspecific promoter may be used, such as the CMV promoter or another commercially available promoter found in expression vectors (Wu et al., 1996 Toxicol. Appl. Pharmacol. 141: 330-9). In a preferred embodiment, a Zmax1 cDNA or its antisense is transcribed by a bone-specific promoter, such as the osteocalcin or another promoter, to achieve specific expression in bone tissue. In this way, if a Zmax1-expressing DNA construct or HBM-expressing construct is introduced into non-bone tissue, it will not be expressed.

[0648] In a third embodiment of this method, antibodies against Zmax1, LRP6, HBM-like or HBM are used to modulate its function. Such antibodies are identified herein.

[0649] In a fourth embodiment of this method, drugs that are agonists or antagonists of Zmax1 function or HBM function are used. Such drugs are described herein and optimized according to techniques of medicinal chemistry well known to one skilled in the art of pharmaceutical development.

[0650] Zmax1 and HBM interact with several proteins, such as ApoE. Molecules that inhibit the interaction between Zmax1 or HBM and ApoE or another binding partner are expected to alter bone development and mineralization. Such inhibitors may be useful as drugs in the treatment of osteoporosis, osteopetrosis, or other diseases of bone mineralization. Such inhibitors may be low molecular weight compounds, proteins or other types of molecules. See, Kim et al., 1998 J. Biochem. (Tokyo) 124: 1072-1076.

[0651] Inhibitors of the interaction between Zmax1 or HBM and interacting proteins may be isolated by standard drug-screening techniques. For example, Zmax1 protein, (or a fragment thereof) or HBM protein (or a fragment thereof) can be immobilized on a solid support such as the base of microtiter well. A second protein or protein fragment, such as ApoE is derivatized to aid in detection, for example with fluorescein. Iodine, or biotin, then added to the Zmax1 or HBM in the presence of candidate compounds that may specifically inhibit this protein-protein domain of Zmax1 or HBM, respectively, and thus avoid problems associated with its transmembrane segment. Drug screens of this type are well known to one skilled in the art of pharmaceutical development.

[0652] Because Zmax1 and HBM are involved in bone development, proteins that bind to Zmax1 and HBM are also expected to be involved in bone development. Such binding proteins can be identified by standard methods, such as co-immunoprecipitation, co-fractionation, or the two-hybrid screen (Ausubel et al., Current Protocols in Molecular Biology, John Wiley & Sons (1997)). For example, to identify Zmax1-interacting proteins or HBM-interacting proteins using the two-hybrid system, the extracellular domain of Zmax1 or HBM is fused to LexA and expressed for the yeast vector pEG202 (the “bait”) and expressed in the yeast strain EGY48. The yeast strain is transformed with a “prey” library in the appropriate vector, which encodes a galactose-inducible transcription-activation sequence fused to candidate interacting proteins. The techniques for initially selecting and subsequently verifying interacting proteins by this method are well known to one skilled in the art of molecular biology (Ausubel et al., 1997).

[0653] In a preferred embodiment, proteins that interact with HBM, but not Zmax1, are identified using a variation of the above procedure (Xu et al., 1997 Proc. Natl. Acad. Sci. USA, 94: 12473-8). This variation of the two-hybrid system uses two baits, and Zmax1 and HBM are each fused to LexA and TetR, respectively. Alternatively, proteins that interact with the HBM but not Zmax1 are also isolated. These procedures are well known to one skilled in the art of molecular biology, and are a simple variation of standard two-hybrid procedures.

[0654] As an alternative method of isolating substances interacting with Zmax1 or HBM, a biochemical approach is used. The Zmax1 protein or a fragment thereof, such as the extracellular domain, or the HBM protein or a fragment thereof, such as the extracellular domain, is chemically coupled to Sepharose beads. The Zmax1- or HBM-coupled beads are poured into a column. A biological extract, such as a lipid fraction, serum proteins, proteins in the supernatant of a bone biopsy, or cellular contents from gently lysed osteoblast cells, is added to the column. Non-specifically bound compounds are eluted, the column is washed several times with a low-salt buffer, and then tightly binding compounds may be eluted with a high-salt buffer. These are candidate compounds that bind to Zmax1 or HBM, and can be tested for specific binding by standard tests and control experiments. Sepharose beads used for coupling proteins and the methods for performing the coupling are commercially available (Sigma), and the procedures described here are well known to one skilled in the art of protein biochemistry.

[0655] As a variation of the above procedure, proteins that are eluted by high salt from the Zmax1- or HBM-sepharose column are then added to an HBM-Zmax1-sepharose column. Proteins that flow through without sticking are proteins that bind to Zmax1 but not to HBM. Alternatively, proteins that bind to the HBM protein and not to the Zmax1 protein can be isolated by reversing the order in which the columns are used.

[0656] Isolated compounds may be identified by standard methods such as 2D gel electrophoresis, chromatography, and mass spectroscopy.

[0657] 24. Method of Use: Transformation-Associated Recombination (TAR) Cloning

[0658] Essential for the identification of novel allelic variants of Zmax1 (LRP5) and LRP6 is the ability to examine the sequence of both copies of the gene in an individual. To accomplish this, two “hooks,” or regions of significant similarity, are identified within the genomic sequence such that they flank the portion of DNA that is to be cloned. Most preferably, the first of these hooks is derived from sequences 5′ to the first exon of interest and the second is derived from sequences 3′ to the last exon of interest. These two “hooks” are-cloned into a bacterial/yeast shuttle vector such as that described by Larionov et al., 1997 Proc. Natl. Acad. Sci. USA, 94: 7384-7. Other similar vector systems may also be used. To recover the entire genomic copy of the Zmax1 gene, the plasmid containing the two “hooks” is linearized with a restriction endonuclease or is produced-by another method such as PCR. This linear DNA fragment is introduced into yeast cells along with human genomic DNA. Typically, the yeast Saccharomyces cerevisiae is used as a host cell, although Kourina et al., 1998 Genome Res. 8: 666-72 have reported using chicken host cells as well. During and after the process of transformation, the endogenous host cell converts the linear plasmid to a circle by a recombination event whereby the region of the human genomic DNA homologous to the “hooks” is inserted into the plasmid. This plasmid can be recovered and analyzed by methods well known to one skilled in the art. Obviously, the specificity for this reaction requires the host cell machinery to recognize sequences similar to the “hooks” present in the linear fragment. However, 100% sequence identity is not required, as shown by Kouprina et al., 1998 Genomics 53: 21-8, where the author describes using degenerate repeated sequences common in the human genome to recover fragments of human DNA from a rodent/human hybrid cell line.

[0659] In another example, only one “hook” is required, as described by Larionov et al., 1998 Proc. Natl Acad Sci. USA, 95: 4469-74. For this type of experiment, termed “radial TAR cloning,” the other region of sequence similarity to drive the recombination is derived from a repeated sequence from the genome; In this way, regions of DNA adjacent to the Zmax1 gene coding region can be recovered and examined for alterations that may affect function.

[0660] 25. Methods of Use: Genomic Screening

[0661] The use of polymorphic genetic markers linked to the HBM gene, or to Zmax1 (LRP5) or to LRP6 is very useful in predicting susceptibility to osteoporosis or other bone diseases. Koller et al., 1998 Amer. J. Bone Min. Res. 13: 1903-8 have demonstrated that the use of polymorphic genetic markers is useful for linkage analysis. Similarly, the identification of polymorphic genetic markers within the high bone mass gene will allow the identification of specific allelic variants that are in linkage disequilibrium with other genetic lesions that affect bone development. Using the DNA sequence from the BACs, a dinucleotide CAn repeat was identified and two unique PCR primers that will amplify the genomic DNA containing this repeat were designed, as shown below:

| | | |
|---|---|---|
| B200E21C16_L: | GAGAGGCTATATCCCTGGGC | (SEQ ID NO: 38) |
| B200E21C16_R: | ACAGCACGTGTTTAAAGGGG | (SEQ ID NO: 39) |

and used in the genetic mapping study.

[0663] This method has been used successfully by others skilled in the art (e.g., Sheffield et al., 1995 Genet., 4:1837-44, LeBlanc-Straceski et al., 1994 Genomics, 19: 341-9; Chen et al., 1995 Genomics, 25:1-8). Use of these reagents with populations or individuals will predict their risk for osteoporosis. Similarly, single nucleotide polymorphisms (SNPs), such as those shown in Table 4 above, can be used as well to predict risk for developing bone diseases or resistance to osteoporosis in the case of the HBM gene.

[0664] 26. Methods of Use: Modulators of Tissue Calcification

[0665] The calcification of tissues in the human body is well documented. Towler et al. (1998 J. Biol. Chem. 273: 30427-34) demonstrated that several proteins known to regulate calcification of the developing skull in a model system are expressed in calcified aorta. The expression of Msx2, a gene transcribed in osteoprogenitor cells, in calcified vascular tissue indicates that genes which are important in bone development are involved in calcification of other tissues.

[0666] Treatment with HBM protein, HBM-like proteins and polypeptides, agonists of LRP5 and LRP6 and HBM or antagonists of Dkk-1 are likely to ameliorate calcification (such as the vasculature, dentin and bone of the skull viscera) due to its demonstrated effect on bone mineral density. In experimental systems where tissue calcification is demonstrated, the over-expression or repression of Zmax1 (LRP5) activity permits the identification of molecules that are directly regulated by the Zmax1 gene. These genes are potential targets for therapeutics aimed at modulating tissue calcification. For example, an animal, such as the LDLR −/−, mouse is fed a high fat diet and is observed to demonstrate expression of markers of tissue calcification, including Zmax1. These animals are then treated with antibodies to Zmax1 or HBM protein, antisense oligonucleotides directed against Zmax1 or HBM cDNA, or with compounds known to bind the Zmax1 or HBM protein or its binding partner or ligand. RNA or proteins are extracted from the vascular tissue and the relative expression levels of the genes expressed in the tissue are determined by methods well known in the art. Genes that are regulated in the tissue are potential therapeutic targets for pharmaceutical development as modulators of tissue calcification.

[0667] The nucleic acids, proteins, peptides, amino acids, small molecules or other pharmaceutically useful compounds of the present invention that are to be given to an individual may be administered in the form of a composition with a pharmaceutically acceptable carrier, excipient or diluent, which are well known in the art. The individual may be a mammal or a bird, preferably a human, a rat, a mouse or bird. Such compositions may be administered to an individual in a pharmaceutically effective amount. The amount administered will vary depending on the condition being treated and the patient being treated. The compositions may be administered alone or in combination with other treatments.

[0668] 27. Methods to Identify Agents that Modulate the Expression of a Nucleic Acid Encoding the Dkk and/or CORP5 Proteins and/or Dkk Interacting Proteins

[0669] Another embodiment of the present invention provides methods for identifying agents that modulate the expression of a nucleic acid encoding Dkk, which is part of the Wnt pathway and that interacts with LRP5, LRP6 and to much lesser extent to HBM and its variants. Such assays may utilize any available means of monitoring for changes in the expression level of the nucleic acids of the invention. As used herein, an agent is said to modulate the expression of Dkk, if it is capable of up- or down-regulating expression of the nucleic acid in a cell (e.g., mRNA).

[0670] In one assay format, cell lines that contain reporter gene fusions between the nucleic acid encoding Dkk (or proteins which modulate the activity of Dkk) and any assayable fusion partner may be prepared. Numerous assayable fusion partners are known and readily available, including but not limited to the firefly luciferase gene and the gene encoding chloramphenicol acetyltransferase (Alam et al., 1990 Anal. Biochem. 188: 245-54). Cell lines containing the reporter gene fusions are then exposed to the agent to be tested under appropriate conditions and time. Differential expression of the reporter gene between samples exposed to the agent and control samples identifies agents which modulate the expression of a nucleic acid encoding Dkk or other protein which modulates Dkk activity. Such assays can similarly be used to determine whether LRP5 and even LRP6 activity is modulated by regulating Dkk activity. This can also be performed with the HBM variants.

[0671] Additional assay formats may be used to monitor the ability of the agent(s) to modulate the expression of a nucleic acid encoding Dkk, alone or Dkk and LRP5, and/or Dkk interacting proteins such as those identified in FIG. 31. For instance, mRNA expression may be monitored directly by hybridization to the nucleic acids of the invention. Cell lines are exposed to the agent to be tested under appropriate conditions and time and total RNA or mRNA is isolated by standard procedures such those disclosed in Sambrook et al. (1989); Ausubel et al., Current Protocols in Molecular Biology (Greene Publishing Co., NY, 1995); Maniatis et al., Molecular Cloning: A Laboratory Manual (Cold Spring Harbor Laboratory, Cold Spring Harbor, N.Y., 1982); and Short Protocols in Molecular Biology: A Compendium of Methods from Current Protocols in Molecular Biology (Frederick M. Ausubel et al., April 1999).

[0672] Probes to detect differences in RNA expression levels between cells exposed to the agent and control cells may be prepared from the nucleic acids of the invention. It is preferable, but not necessary, to design probes which hybridize only with target nucleic acids under conditions of high stringency. Only highly complementary nucleic acid hybrids form under conditions of high stringency. Accordingly, the stringency of the assay conditions determines the amount of complementarity which should exist between two nucleic acid strands in order to form a hybrid. Stringency should be chosen to maximize the difference in stability between the probe:target hybrid and potential probe:non-target hybrids.

[0673] Probes may be designed from the nucleic acids of the invention through methods known in the art. For instance, the G+C content of the probe and the probe length can affect probe binding to its target sequence. Methods to optimize probe specificity are commonly available. See for example, Sambrook et al. (1989) or Ausubel et al. (Current Protocols in Molecular Biology, Greene Publishing Co., NY, 1995).

[0674] Hybridization conditions are modified using known methods, such as those described by Sambrook et al. (1989) and Ausubel et al. (1995), as suitable for each probe. Hybridization of total cellular RNA or RNA enriched for polyA RNA can be accomplished in any available format. For instance, total cellular RNA or RNA enriched for polyA RNA can be affixed to a solid support and the solid support exposed to at least one probe comprising at least one, or part of one of the nucleic acid sequences of the invention under conditions in which the probe will specifically hybridize. Alternatively, nucleic acid fragments comprising at least one, or part of one of the sequences of the invention can be affixed to a solid support, such as a porous glass wafer. The glass or silica wafer can then be exposed to total cellular RNA or polyA RNA from a sample under conditions in which the affixed sequences will specifically hybridize. Such glass wafers and hybridization methods are widely available, for example, those disclosed by Beattie (WO 95/11755). By examining for the ability of a given probe to specifically hybridize to an RNA sample from an untreated cell population and from a cell population exposed to the agent, agents which up- or down-regulate the expression of a nucleic acid encoding Dkk, a Dkk interacting protein, and/or LRP5 can be identified.

[0675] Microarray technology and transcriptional profiling are examples of methods which can be used to analyze the impact of putative Dkk or Dkk interacting protein modulating compounds. For transcriptional profiling, mRNA from cells exposed in vivo to a potential Dkk modulating agent, such as the Dkk interacting proteins identified in the present invention (e.g., those identified in FIG. 31), agents which modulate Dkk interacting proteins, and mRNA from the same type of cells that were not exposed to the agent could be reverse transcribed and hybridized to a chip containing DNA from numerous genes, to thereby compare the expression of genes in cells treated and not treated with the agent. If, for example a putative Dkk modulating agent down-regulates the expression of Dkk in the cells, then use of the agent may be undesirable in certain patient populations. For additional methods of transcriptional profiling and the use of microarrays, refer to, for example, U.S. Pat. No. 6,124,120 issued to Lizardi (2000).

[0676] Additional methods for screening the impact of Dkk and Dkk interacting protein modulating compounds or the impact of Dkk or Dkk interacting proteins on modulation of LRP5, LRP6, HBM, HBM variants or the Wnt pathway include the use of TaqMan® PCR, conventional reverse transcriptase PCR (RT-PCR), changes in downstream surrogate markers (i.e., Wnt responsive genes), and anti-Dkk Western blots for protein detection. Other methods would be readily apparent to the artisan of ordinary skill.

[0677] 28. Methods to Identify Agents that Modulate at Least One Activity of Dkk, a Dkk Interacting Protein, or LRP5/LRP6/HBM/HBM-like

[0678] Another embodiment of the present invention provides methods for identifying agents that modulate at least one activity of Dkk, Dkk interacting proteins, and/or LRP5/LRP6/HBM/HBM-like proteins or preferably which specifically modulate an activity of a Dkk/Dkk interacting protein complex or an LRP5 (or LRP6/HBM/HBM-like)/Dkk complex, or a biologically active fragment of Dkk (e.g., comprising the domain which binds LRP5/LRP6/HBM/HBM-like) or a Dkk interacting protein complex. Such methods or assays may utilize any means of monitoring or detecting the desired activity as would be known in the art (See, e.g., Wu et al., 2000 Curr. Biol. 10:1611-4; Fedi et al., 199 J. Biol. Chem. 274:19465-72; Grotewold et al., 1999 Mech. Dev. 89:151-3; Shibata et al., 2000 Mech. Dev. 96: 243-6; Wang et al., 2000 Oncogene 19: 1843-8; and Glinka et al., 1998 Nature 391: 357-62). Potential agents which modulate Dkk include, for example, p53, the tumor suppressor protein, which can induce Dkk-1. Damage to DNA has also been observed to up-regulate Dkk-1 expression via a stabilization and activation of p53 (Wang et al., 2000 Oncogene 19: 1843-48); and, Shou et al., 2002 Oncogene 21: 878-89). Additionally, Fedi et al. (1999) purportedly showed that Dkk-1 can block the Wnt2-induced oncogenic transformation of NIH-3T3 cells. Furthermore, it has been suggested that Dkk expression may be modulated by BMP signaling in the developing skeleton (Mukhopadhyay et al., 2001 Dev. Cell. 1: 423-34; and Grotewold et al., 2002 EMBO J. 21: 966-75). Grotewald et al. additionally describe altered Dkk expression levels in response to stress signals including UV irradiation and other genotoxic stimuli. They propose that Dkk expression is pro-apoptotic. In the HBMMTIC animals described herein, a reduced osteoblast apoptosis effect was observed. Thus, HBM and HBM like variants may control/alter Dkk's role in programmed cell death. Other agents which potentially modulate Dkk activity include the Dkk interacting proteins identified in FIG. 31.

[0679] In one embodiment, the relative amounts of Dkk or a Dkk interacting protein of a cell population that has been exposed to the agent to be tested is compared to an un-exposed control cell population. Antibodies can be used to monitor the differential expression of the protein in the different cell populations. Cell lines or populations are exposed to the agent to be tested under appropriate conditions and time. Cellular lysates may be prepared from the exposed cell line or population and a control, unexposed cell line or population. The cellular lysates are then analyzed with the probe, as would be known in the art. See, e.g., Ed Harlow and David Lane, Antibodies: A Laboratory Manual (Cold Spring Harbor, N.Y., 1988) and Ed Harlow and David Lane, Using Antibodies: A Laboratory Manual (Cold Spring Harbor, N.Y. 1998).

[0680] For example, N- and C- terminal fragments of Dkk can be expressed in bacteria and used to search for proteins which bind to these fragments. Fusion proteins, such as His-tag or GST fusion to the N- or C-terminal regions of Dkk (or to biologically active domains of Dkk-1) or a whole Dkk protein can be prepared. These fusion proteins can be coupled to, for example, Talon or Glutathione-Sepharose beads and then probed with cell lysates to identify molecules which bind to Dkk. Prior to lysis, the cells may be treated with purified Wnt proteins, RNA, or drugs which may modulate Wnt signaling or proteins that interact with downstream elements of the Wnt pathway. Lysate proteins binding to the fusion proteins can be resolved by SDS-PAGE, isolated and identified by, for example protein sequencing or mass spectroscopy, as is known in the art. See, e.g., Protein Purification Applications: A Practical Approach (Simon Roe, ed., 2^{nd} ed. Oxford Univ. Press, 2001) and “Guide to Protein Purification” in Meth. Enzymology vol. 182 (Academic Press, 1997).

[0681] The activity of Dkk, a Dkk interacting protein, or a complex of Dkk with LRP5/LRP6/HBM/HBM-like may be affected by compounds which modulate the interaction between Dkk and a Dkk interacting protein (such as those shown in FIG. 31) and/or Dkk and LRP5/LRP6/HBM/HBM-like. The present invention provides methods and research tools for the discovery and characterization of these compounds. The interaction between Dkk and a Dkk interacting protein and/or Dkk and LRP5/6/HBM/HBM-like may be monitored in vivo and in vitro. Compounds which modulate the stability of a Dkk-LRP5/LRP6/HBM/HBM-like complex are potential therapeutic compounds. Example in vitro methods include: Binding LRP5/6/HBM/HBM-like, Dkk, or a Dkk interacting protein to a sensor chip designed for an instrument such are made by Biacore (Uppsala, Sweden) for the performance of an plasmon resonance spectroscopy observation. In this method, the chip with one of Dkk, a Dkk interacting protein, or LRP5/6 is first exposed to the other under conditions which permit them to form the complex. A test compound is then introduced and the output signal of the instrument provides an indication of any effect exerted by the test compound. By this method, compounds may be rapidly screened. Another, in vitro, method is exemplified by the SAR-by-NMR methods (Shuker et al., Science. 274:1531-4 (1996)). Briefly, a Dkk-1 binding domain and/or LRP 5 or 6 LBD are expressed and purified as ¹⁵N labeled protein by expression in labeled media. The labeled protein(s) are allowed to form the complex in solution in an NMR sample tube. The heteronuclear correlation spectrum in the presence and absence of a test compound provides data at the level of individual residues with regard to interactions with the test compound and changes at the protein-protein interface of the complex. One of skill in the art knows of many other protocols, e.g. affinity capillary electrophoresis (Okun et al., 2001 J. Biol. Chem. 276: 1057-62; Vergnon et al., 1999 Methods, 19: 270-7), fluorescence spectroscopy, electron paramagnetic resonance, etc. which can monitor the modulation of a complex and/or measure binding affinities for complex formation.

[0682] In vitro protocols for monitoring the modulation of a Dkk/LRP5/LRP6/HBM/HBM-like complex include the yeast two hybrid protocol. The yeast two hybrid method may be used to monitor the modulation of a complex in vivo by monitoring the expression of genes activated by the formation of a complex of fusion proteins of Dkk and LRP ligand binding domains. Nucleic acids according to the invention which encode the interacting Dkk and LRP LBD domains are incorporated into bait and prey plasmids. The Y2H protocol is performed in the presence of one or more test compounds. The modulation of the complex is observed by a change in expression of the complex activated gene. It will be appreciated by one skilled in the art that test compounds can be added to the assay directly or, in the case of proteins, can be coexpressed in the yeast with the bait and prey compounds. Similarly, fusion proteins of Dkk and Dkk interacting proteins can also be used in a Y2H screen to identify other proteins which modulate the Dkk/Dkk interacting protein complex.

[0683] Assay protocols such as these may be used in methods to screen for compounds, drugs, treatments which modulate the Dkk/Dkk interacting protein and/or Dkk/LRP5/6 complex, whether such modulation occurs by competitive binding, or by altering the structure of either LRP 5/6 or Dkk at the binding site, or by stabilizing or destablizing the protein-protein interface. It may be anticipated that peptide aptamers may competitively bind, although induction of an altered binding site structure by steric effects is also possible.

[0684] 28.1 Antibodies and Antibody Fragments

[0685] Polyclonal and monoclonal antibodies and fragments of these antibodies which bind to Dkk or LRP5/LRP6/HBM/HBM-like can be prepared as would be known in the art. For example, suitable host animals can be immunized using appropriate immunization protocols and the peptides, polypeptides or proteins of the invention. Peptides for use in immunization are typically about 8-40 residues long. If necessary or desired, the polypeptide immunogens can be conjugated to suitable carriers. Methods for preparing immunogenic conjugates with carriers such as bovine serum albumin (BSA), keyhole limpet hemocyanin (KLH), or other carrier proteins are well known in the art (See, Harlow et al., 1988). In some circumstances, direct conjugation using, for example, carbodiimide reagents, may be effective; in other instances linking reagents such as those supplied by Pierce Chemical Co., Rockford, Ill., may be desirable to provide accessibility to the polypeptide or hapten. The hapten peptides can be extended at either the amino or carboxy terminus with a cysteine residue or interspersed with cysteine residues, for example, to facilitate linking to a carrier. Administration of the immunogens is conducted generally by injection over a suitable time period and with use of suitable adjuvants, as is generally understood in the art. During the immunization schedule, titers of antibodies are taken to determine adequacy of antibody formation.

[0686] Anti-peptide antibodies can be generated using synthetic peptides, for example, the peptides derived from the sequence of any Dkk, including Dkk-1, or LRP5/LRP6/HBM/HBM-like. Synthetic peptides can be as small as 2-3 amino acids in length, but are preferably at least 3, 5, 10, or 15 or more amino acid residues long. Such peptides can be determined using programs such as. DNAStar. The peptides are coupled to KLH using standard methods and can be immunized into animals such as rabbits. Polyclonal anti-Dkk or anti-LRP5/LRP6/HBM/HBM-like peptide antibodies can then be purified, for example using Actigel beads containing the covalently bound peptide.

[0687] While the polyclonal antisera produced in this way may be satisfactory for some applications, for pharmaceutical compositions, use of monoclonal preparations is preferred. Immortalized cell lines which secrete the desired monoclonal antibodies may be prepared using the standard method of Kohler and Milstein or modifications which effect immortalization of lymphocytes or spleen cells, as is generally known (See, e.g., Harlow et al., 1988 and 1998). The immortalized cell lines secreting the desired antibodies can be screened by immunoassay in which the antigen is the peptide hapten, polypeptide or protein. When the appropriate immortalized cell culture secreting the desired antibody is identified, the cells can be cultured either in vitro or by production in ascites fluid.

[0688] The desired monoclonal antibodies are then recovered from the culture supernatant or from the ascites supernatant. Fragments of the monoclonal antibodies which contain the immunologically significant portion can be used as agonists or antagonists of Dkk activity. Use of immunologically reactive fragments, such as the Fab, scFV, Fab′, of F(ab′)₂ fragments are often preferable, especially in a therapeutic context, as these fragments are generally less immunogenic than the whole immunoglobulin.

[0689] The antibodies or fragments may also be produced, using current technology, by recombinant means. Regions that bind specifically to the desired regions of Dkk or LRP5/LRP6/HBM/HBM-like can also be produced in the context of chimeras with multiple species origin. Antibody reagents so created are contemplated for use diagnostically or as stimulants or inhibitors of Dkk activity.

[0690] In one embodiment, antibodies against Dkk, bind Dkk with high affinity, i.e., ranging from ₁₀⁻⁵ to 10⁻⁹ M. Preferably, the anti-Dkk antibody will comprise a chimeric, primate, Primatized®, human or humanized antibody. Also, the invention embraces the use of antibody fragments, e.g., Fab's, Fv's, Fab's, F(ab)₂, and aggregates thereof.

[0691] Another embodiment contemplates chimeric antibodies which recognize Dkk or LRP5/LRP6/HBM/HBM-like. A chimeric antibody is intended to refer to an antibody with non-human variable regions and human constant regions, most typically rodent variable regions and human constant regions.

[0692] A “primatized® antibody” refers to an antibody with primate variable regions, e.g., CDR's, and human constant regions. Preferably, such primate variable regions are derived from an Old World monkey.

[0693] A “humanized antibody” refers to an antibody with substantially human framework and constant regions, and non-human complementarity-determining regions (CDRs). “Substantially” refers to the fact that humanized antibodies typically retain at least several donor framework residues (i.e., of non-human parent antibody from which CDRs are derived).

[0694] Methods for producing chimeric, primate, primatized®, humanized and human antibodies are well known in the art. See, e.g., U.S. Pat. No. 5,530,101, issued to Queen et al.; U.S. Pat. No. 5,225,539, issued to Winter et al.; U.S. Pat. Nos. 4,816,397 and 4,816,567, issued to Boss et al. and Cabilly et al. respectively, all of which are incorporated by reference in their entirety.

[0695] The selection of human constant regions may be significant to the therapeutic efficacy of the subject anti-Dkk or LRP5/LRP6/HBM/HBM-like antibody. In a preferred embodiment, the subject anti-Dkk or LRP5/LRP6/HBM/HBM-like antibody will comprise human, gamma 1, or gamma 3 constant regions and, more preferably, human gamma 1 constant regions.

[0696] Methods for making human antibodies are also known and include, by way of example, production in SCID mice, and in vitro immunization.

[0697] The subject anti-Dkk or LRP5/LRP6/HBM/HBM-like antibodies can be administered by various routes of administration, typically parenteral. This is intended to include intravenous, intramuscular, subcutaneous, rectal, vaginal, and administration with intravenous infusion being preferred.

[0698] The anti-Dkk or LRP5/LRP6/HBM/HBM-like antibody will be formulated for therapeutic usage by standard methods, e.g., by addition of pharmaceutically acceptable buffers, e.g., sterile saline, sterile buffered water, propylene glycol, and combinations thereof.

[0699] Effective dosages will depend on the specific antibody, condition of the patient, age, weight, or any other treatments, among other factors. Typically effective dosages will range from about 0.001 to about 30 mg/kg body weight, more preferably from about 0.01 to 25 mg/kg body weight, and most preferably from about 0.1 to about 20 mg/kg body weight.

[0700] Such administration may be effected by various protocols, e.g., weekly, bi-weekly, or monthly, depending on the dosage administered and patient, response. Also, it may be desirable to combine such administration with other treatments.

[0701] Antibodies to Dkk-1 interacting proteins, such as those identified in FIG. 31, are also contemplated according to the present invention, and can be used similarly to the Dkk-1 antibodies mentioned in the above methodology.

[0702] The antibodies of the present invention can be utilized in experimental screening, as diagnostic reagents, and in therapeutic compositions.

[0703] 28.2 Chemical Libraries

[0704] Agents that are assayed by these methods can be randomly selected or rationally selected or designed. As used herein, an agent is said to be randomly selected when the agent is chosen randomly without considering the specific sequences involved in the association of Dkk-1 alone, Dkk-1 interacting proteins alone, or with their associated substrates, binding partners, etc. An example of randomly selected agents is the use of a chemical library or a peptide combinatorial library, or a growth broth of an organism.

[0705] The agents of the present invention can be, as examples, peptides, small molecules, vitamin derivatives, as well as carbohydrates. A skilled artisan can readily recognize that there is no limit as to the structural nature of the agents of the present invention.

[0706] 28.3 Peptide Synthesis

[0707] The peptide agents of the invention can be prepared using standard solid phase (or solution phase) peptide synthesis methods, as is known in the art. In addition, the DNA encoding these peptides may be synthesized using commercially available oligonucleotide. synthesis instrumentation and produced recombinantly using standard recombinant production systems. The production of polypeptides using solid phase peptide synthesis is necessitated if non-nucleic acid-encoded amino acids are to be included.

[0708] 29. Uses for Agents that Modulate at Least One Activity of Dkk, a Dkk Interacting Protein, a Dkk/Dkk Interacting Protein Complex, or a Dkk/LRP5 or Dkk/LRP6 Complex

[0709] The proteins and nucleic acids of the invention, such as the proteins or polypeptides containing an amino acid sequence of LRP5, Disk, and Dkk interacting proteins are involved in bone mass modulation and lipid modulation of other Wnt pathway mediated activity. Agents that modulate (i.e., up and down-regulate) the expression of Dkk or Dkk interacting proteins, or agents, such as agonists and antagonists respectively, of at least one activity of Dkk or a Dkk interacting protein may be used to modulate biological and pathologic processes associated with the function and activity of Dkk or a Dkk interacting protein.

[0710] As used herein, a subject can be preferably any mammal, so long as the mammal is in need of modulation of a pathological or biological process modulated by a protein of the invention. The term “mammal” means an individual belonging to the class Mammalia. The invention is particularly useful in the treatment of human subjects.

[0711] As used herein, a biological or pathological process modulated by Dkk or a Dkk interacting protein may include binding of Dkk to a Dkk interacting protein, Dkk to LRP5 or LRP6 or release therefrom, inhibiting or activating Dkk or a Dkk interacting protein mRNA synthesis or inhibiting Dkk or Dkk interacting protein modulated inhibition of LRP5 or LRP6 mediated Wnt signaling. Further bone-related markers may be observed such as alkaline phosphatase activity, osteocalcin production, or mineralization.

[0712] Pathological processes refer to a category of biological processes which produce a deleterious effect. For example, expression or up-regulation of expression of LRP5 or LRP6 and/or Dkk and/or a Dkk interacting protein may be associated with certain diseases or pathological conditions. As used herein, an agent is said to modulate a pathological process when the agent statistically significantly (p<0.05) alters the process from its base level in the subject. For example, the agent may reduce the degree or severity of the process mediated by that protein in the subject to which the agent was administered. For instance, a disease or pathological condition may be prevented, or disease progression modulated by the administration of agents which reduce or modulate in some way the expression or at least one activity of a protein of the invention.

[0713] As LRP5/6 and Dkk are involved both directly and indirectly in bone mass modulation, one embodiment of this invention is to use Dkk or Dkk interacting protein expression as a method of diagnosing a bone condition or disease. Certain markers are associated with specific Wnt signaling conditions (e.g., TCF/LEF activation). Diagnostic tests for bone conditions may include the steps of testing a sample or an extract thereof for the presence of Dkk or Dkk interacting protein nucleic acids (i.e., DNA or RNA), oligomers or fragments thereof or protein products of TCF/LEF regulated expression. For example, standard in situ hybridization or other imaging techniques can be utilized to observe products of Wnt signaling. Other diagnostic techniques, as described herein, would also be useful as would be apparent to the skilled artisan (e.g., a serum marker).

[0714] This invention also relates to methods of modulating bone development or bone loss conditions. Inhibition of bone loss may be achieved by inhibiting or modulating changes in the LRP5/6 mediated Wnt signaling pathway. For example, absence of LRP5 activity may be associated with low bone mass. Increased activity LRP5 may be associated with high bone mass. Therefore, modulation of LRP5 activity will in turn modulate bone development. Modulation of the Dkk/LRP5/6 or Dkk/Dkk interacting protein complex via agonists and antagonists is one embodiment of a method to regulate bone development. Such modulation of bone development can result from inhibition of the activity of, for example, a Dkk/LRP(5/6) protein complex, a Dkk/Dkk interacting protein complex, upregulated transcription of the LRP5 gene or inhibited transcription or translation of Dkk or Dkk interacting protein mRNA.

[0715] The agents of the present invention can be provided alone, or in combination with other agents that modulate a particular pathological process. As used herein, two agents are said to be administered in combination when the two agents are administered simultaneously or are administered independently in a fashion such that the agents will act at the same time.

[0716] The agents of the present invention can be administered via parenteral, subcutaneous (sc), intravenous (iv), intramuscular (im), intraperitoneal (ip), transdermal or buccal routes. Alternatively, or concurrently, administration may be by the oral route. The dosage administered will be dependent upon the age, health, and weight of the recipient, kind of concurrent treatment, if any, frequency of treatment, and the nature of the effect desired.

[0717] The present invention further provides compositions containing one or mi ore agents which modulate expression or at least one activity of a protein of the invention. While individual needs vary, determination of optimal ranges of effective amounts of each component is within the skill of the art. Typical dosages of the active agent which mediate Dkk or Dkk interacting protein activity comprise from about 0.0001 to about 50 mg/kg body weight. The preferred dosages comprise from about 0.001 to about 50 mg/kg body weight. The most preferred dosages comprise from about 0.1 to about 1 mg/kg body weight. In an average human of 70 kg, the range would be from about 7 μg to about 3.5 g, with a preferred range of about 0.5 mg to about 5 mg.

[0718] In addition to the pharmacologically active agent, the compositions of the present invention may contain suitable pharmaceutically acceptable carriers comprising excipients and auxiliaries which facilitate processing of the active compounds into preparations which can be used pharmaceutically for delivery to the site of action. Suitable formulations for parenteral administration include aqueous solutions of the active compounds in water-soluble form, for example, water-soluble salts. In addition, suspensions of the active compounds as appropriate oily injection suspensions may be administered. Suitable lipophilic solvents or vehicles include fatty oils, for example, sesame oil, or synthetic fatty acid esters, (e.g., ethyl oleate or triglycerides). Aqueous injection suspensions may contain substances which increase the viscosity of the suspension include, for example, sodium carboxymethyl cellulose, sorbitol and/or dextran. Optionally, the suspension may also contain stabilizers. Liposomes and other non-viral vectors can also be used to encapsulate the agent for delivery into the cell.

[0719] The pharmaceutical formulation for systemic administration according to the invention may be formulated for enteral, parenteral, or topical (top) administration. Indeed, all three types of formulations may be used simultaneously to achieve systemic administration of the active ingredient.

[0720] Suitable formulations for oral administration include hard or soft gelatin capsules, pills, tablets, including coated tablets, elixirs, suspensions, syrups or inhalations and controlled release forms thereof.

[0721] Potentially, any compound which binds Dkk or a Dkk interacting protein or modulates the Dkk/LRP5 or Dkk/LRP6 or Dkk/Dkk interacting protein complex may be a therapeutic compound. In one embodiment of the invention, a peptide or nucleic acid aptamer according to the invention is used in a therapeutic composition. Such compositions may comprise an aptamer, or a LRP5 or LRP6 fragment unmodified or modified. In another embodiment, the therapeutic compound comprises a Dkk-1 interacting protein, or biologically active fragment thereof.

[0722] Nucleic acid aptamers have been used in compositions for example by chemical bonding to a carrier molecule such as polyethylene glycol (PEG) which may facilitate uptake or stabilize the aptamer. A di-alkylgylcerol moiety attached to an RNA will embed the aptamer in liposomes, thus stabilizing the compound. Incorporating chemical substitutions (i.e. changing the 2′OH group of ribose to a 2′NH in RNA confers ribonuclease resistance) and capping, etc. can prevent breakdown. Several such techniques are discussed for RNA aptamers in Brody and Gold (Rev. Mol. Biol. 74:3-13, 2000).

[0723] Peptide aptamers may by used in therapeutic applications by the introduction of an expression vector directing aptamer expression into the affected tissue such as for example by retroviral delivery, by encapsulating the DNA in a delivery complex or simple by naked DNA injection. Or, the aptamer itself or a synthetic analog may be used directly as a drug. Encapsulation in polymers and lipids may assist in delivery. The use of peptide aptamers as therapeutic and diagnostic agents is reviewed by Hoppe-Syler and Butz (J. Mol. Med. 78:426-430 (2000)).

[0724] In another aspect of the invention. The structure of a constrained peptide aptamer of the invention may be determined such as by NMR or X-ray crystallography. (Cavanagh et al., Protein NMR Spectroscopy Principles and Practice, Academic Press, 1996; Drenth, Principles of Protein X-Ray Crystallography, Springer Verlag, 1999) Preferably the structure is determined in complex with the target protein. A small molecule analog is then designed according to the positions of functional elements of the 3D structure of the- aptamer. (Guidebook on Molecular Modeling in Drug Design, Cohen, Ed., Academic Press, 1996; Molecular Modeling and Drug Design (Topics in Molecular and Structural Biology), Vinter and Gardner Eds., CRC Press, 1994) Thus the present invention provides a method for the design of effective and specific drugs which modulate the activity of Dkk, Dkk interacting proteins, Dkk/Dkk interacting protein complex and the Dkk/LRP complex. Small molecule mimetics of the peptide aptamers of the present invention are encompassed within the scope of the invention.

[0725] In practicing the methods of this invention, the compounds of this invention may be used alone or in combination, or in combination with other therapeutic or diagnostic agents. In certain preferred embodiments, the compounds of this invention may be co-administered along with other compounds typically prescribed for these conditions according to generally accepted medical practice. For example, the compounds of this invention can be administered in combination with other therapeutic agents for the treatment of bone loss. Bone loss mediating agents include bone resorption inhibitors such as bisphosphonates (e.g., alendronic acid, clodronic acid, etidronic acid, pamidronic acid, risedronic acid and tiludronic acid), vitamin D and vitamin D analogs, cathepsin K inhibitors, hormonal agents (e.g., calcitonin and estrogen), and selective estrogen receptor modulators or SERMs (e.g., raloxifene). And bone forming agents such as parathyroid hormone (PTH) and bone morphogenetic proteins (BMP).

[0726] Additionally contemplated are combinations of agents which regulate Dkk-1 and agents which regulate lipid levels such as HMG-CoA reductase inhibitors (i.e., statins such as Mevacor®, Lipitor® and other inhibitors such as Baycol®, Lescol®, Pravachol® and Zocor®), bile acid sequestrants (e.g., Colestid® and Welchol®), fibric acid derivatives (Atromid-S®, Lopid®, Tricor®), and nicotinic acid.

[0727] The compounds of this invention can-be utilized in vivo, ordinarily in vertebrates and preferably in mammals, such as humans, sheep, horses, cattle, pigs, dogs, cats, rats and mice, or in vitro.

[0728] 30. Peptide and Nucleotide Aptamers and Peptide Aptamer Mimetics

[0729] Another embodiment contemplates the use of peptide and nucleotide aptamer technology to screen for agents which interact with Dkk, which block Dkk from interacting with LRP5, LRP6, HBM, or HBM-like molecules, or which block any other Dkk ligand interaction, or which interact with Dkk interacting proteins, such as those shown in FIG. 5. Peptide aptamers are molecules in which a variable peptide domain is displayed from a scaffold protein. Thioredoxin A (trxA) is commonly used for a scaffold. The peptide insert destroys the catalytic site of trxA. It is recognized that numerous proteins may also be used as scaffolding proteins to constrain and/or present a peptide aptamer. Other scaffold proteins that could display a constrained peptide aptamer could include staphylococcal nuclease, the protease inhibitor eglin C, the Streptomyces tendea alpha-amylase inhibitor Tendamistat, Sp1, green fluorescent protein (GFP) (reviewed in Hoppe-Seyler et al., 2001 J. Steroid Biochem Mol. Biol. 78: 105-11), and the S1 nucleas from Staphyloccus or M13 for phage display. Any molecule to which the aptamer could be anchored and presented in its bioactive conformation would be suitable.

[0730] Aptamers can then specifically bind to a given target protein in vitro and in vivo and have the potential to selectively block the function of their target protein. Peptide aptamers are selected from randomized expression libraries on the basis of their in vivo binding capacity to the desired target protein. Briefly, a target protein (e.g., Dkk, a Dkk interacting protein, or LRP5/6) is linked to a heterologous DNA binding domain (BD) and expressed as bait in a yeast test strain. Concomitantly, a library coding for different peptides (e.g., 16-mers) of randomized sequence inserted in a scaffold protein sequence, which are linked to a heterologous transcriptional activation domain (AD) is expressed as prey. If a peptide binds to a target protein, a functional transcription factor is reconstituted, in which the BD and AD are bridged together by interacting proteins. This transcription factor is then able to activate the promoter of a marker gene which can be monitored by colorimetric enzymatic assays or by growth selection. Additional variation, methods of preparing and screening methodologies are described in, for example, Hoppe-Seyler et al., 2000 J. Mol. Med. 78: 426-430.

[0731] Nucleotide aptamers are described for example in Brody et al., 2000 Trends Mol. Biotechnol. 74: 5-13. Additional methods of making and using nucleotide aptamers include SELEX, i.e., Systematic Evolution-of Ligands by Exponential Enrichment. SELEX is a process of isolating oligonucleotide ligands of a chosen target molecule (see Tuerk and Gold, Science 249:505-510 (1990); U.S. Pat. Nos. 5,475,096, 5,595,877, and 5,660,985). SELEX, as described in Tuerk and Gold, involves admixing the target molecule with a pool of oligonucleotides (e.g., RNA) of diverse sequences; retaining complexes formed between the target and oligonucleotides; recovering the oligonucleotides bound to the target; reverse-transcribing the RNA into DNA; amplifying the DNA with polymerase chain reactions (PCR); transcribing the amplified DNA into RNA; and repeating the cycle with ever increasing binding stringency. Three enzymatic reactions are required for each cycle. It usually takes 12-15 cycles to isolate aptamers of high affinity and specificity to the target. An aptamer is an oligonucleotide that is capable of binding to an intended target substance but not other molecules under the same conditions.

[0732] In another reference, Bock et al., 1990 Nature 355: 564-6, describe a different process from the SELEX method of Tuerk and Gold in that only one enzymatic reaction is required for each cycle (i.e., PCR) because the nucleic acid library in Bock's method is comprised of DNA instead of RNA. The identification and isolation of aptamers of high specificity and affinity with the method of Bock et al. still requires repeated cycles in a chromatographic column.

[0733] Other nucleotide aptamer methods include those described by Conrad et al, 1996 Meth. Enzymol. 267: 336-367. Conrad et al. describe a variety of methods for isolating aptamers, all of which employ repeated cycles to enrich target-bound ligands and require a large amount of purified target molecules. More recently described methods of making and using nucleotide aptamers include, but are not limited to those described in U.S. Pat. Nos. 6,180,348; 6,051,388; 5,840,867; 5,780,610, 5,756,291 and 5,582,981.

[0734] Potentially, any compound which binds Dkk or a Dkk interacting protein or modulates the Dkk/Dkk interacting protein or Dkk/LRP5, Dkk/LRP6, Dkk/HBM, or Dkk/HBM-like complex may be a therapeutic compound. In one embodiment of the invention, a peptide or nucleic acid aptamer according to the invention is used in a therapeutic composition. Such compositions may comprise an aptamer, or a LRP5 or LRP6 fragment unmodified or modified.

[0735] Nucleic acid aptamers have been used in compositions for example by chemical bonding to a carrier molecule such as polyethylene glycol (PEG) which may facilitate uptake or stabilize the aptamer. A di-alkylglycerol moiety attached to an RNA will embed the aptamer in liposomes, thus stabilizing the compound. Incorporating chemical substitutions (i.e., changing the 2′-OH group of ribose to a 2′-NH in RNA confers ribonuclease resistance) and capping, etc. can prevent breakdown. Several such techniques' are discussed for RNA aptamers in Brody et al., 2000 Rev. Mol. Biol. 74: 3-13.

[0736] Peptide aptamers may by used in therapeutic applications by the introduction of an expression vector directing aptamer expression into the affected tissue such as for example by retroviral delivery, by encapsulating the DNA in a delivery complex or simple by naked DNA injection. Or, the aptamer itself or a synthetic analog may be used directly as a drug. Encapsulation in polymers and lipids may assist in delivery. The use of peptide aptamers as therapeutic and diagnostic agents is reviewed by Hoppe-Syler et al., 2000 J. Mol. Med 78: 426-430.

[0737] In another aspect of the invention, the structure of a constrained peptide aptamer of the invention may be determined such as by NMR or X-ray crystallography. (Cavanah et al;, Protein NMR Spectroscopy Principles and Practice, Academic Press, 1996; Drenth, Principles of Protein X-Ray Crystallography, Springer Verlag, 1999) Preferably the structure is determined in complex with the target protein. A small molecule analog is then designed according to the positions of functional elements of the 3D structure of the aptamer. (Guidebook on Molecular Modeling in Drug Design, Cohen, Ed., Academic Press, 1996; Molecular Modeling and Drug Design (Topics in Molecular and Structural Biology), Vinter and Gardner Eds., CRC Press, 1994) Thus, a method is provided for the design of effective and specific drugs which modulate the activity of Dkk, Dkk interacting proteins, Dkk/Dkk interacting protein complex, and the Dkk/LRP complex. Small molecule mimics of the peptide aptamers of the present invention are also encompassed within the scope of the invention.

### EXAMPLES

[0738] The present invention is described by reference to the following Examples, which are offered by way of illustration and are not intended to limit the invention in any manner. Standard techniques well known in the art or the techniques specifically described below were utilized.

### Example 1

[0739] The propositus was referred by her physicians to the Creighton Osteoporosis Center for evaluation of what appeared to be unusually dense bones. She was 18 years old and came to medical attention two years previous because of back pain, which was precipitated by an auto accident in which the car in which she was riding as a passenger was struck from behind. Her only injury was soft tissue injury to her lower back that was manifested by pain and muscle tenderness. There was no evidence of fracture or subluxation on radiographs. The pain lasted for two years, although she was able to attend school full time. By the time she was seen in the Center, the pain was nearly resolved and she was back to her usual activities as a high school student. Physical exam revealed a normal healthy young woman standing 66 inches and weighing 128 pounds. Radiographs of the entire skeleton revealed dense looking bones with thick cortices. All bones of the skeleton were involved.- Most importantly, the shapes of all the bones were entirely normal. The spinal BMC was 94.48 grams in L1-4, and the spinal BMD was 1.667 gm/cm² in L1-4. BMD was 5.62 standard deviations (SD) above peak skeletal mass for women. These were measured by DXA using a Hologic 2000˜. Her mother was then scanned and a lumbar spinal BMC of 58.05 grams and BMD of 1.500 gm/cm² were found. Her mother's values place her 4.12 SD above peak mass and 4.98 SD above her peers. Her mother was 51 years old, stood 65 inches and weighed 140 pounds. Her mother was in excellent health with no history of musculoskeletal or other symptoms. Her father's lumbar BMC was 75.33 grams and his BMD was 1.118 gm/cm². These values place him 0.25 SD above peak bone mass for males. He was in good health, stood 72 inches tall, and weighed 187 pounds.

[0740] These clinical data suggested that the propositus inherited a trait from her mother, which resulted in very high bone mass, but an otherwise normal skeleton, and attention was focused on the maternal kindred. In U.S. Pat. No. 5,691,153, twenty-two of these members had measurement of bone Mass by DXA. In one case, the maternal grandfather of the propositus, was deceased, however, medical records, antemortem skeletal radiographs and a gall bladder specimen embedded in paraffin for DNA genotyping were obtained. His radiographs showed obvious extreme density of all of the bones available for examination including the femur and the spine, and he was included among the-affected members. In this invention, the pedigree has been expanded to include 37 informative individuals. These additions are a significant improvement over the original kinship (Johnson et al., Am. J. Hum. Genet., 60:1326-1332 (1997)) because, among the fourteen individuals added since the original study, two individuals harbor key crossovers. X-linkage is ruled out by the presence of male-to-male transmission from individual 12 to 14 and 15.

### Example 2

[0741] The present invention describes DNA sequences derived from two BAC clones from the HBM gene region, as evident in Table 7 below, which is an assembly of these clones. Clone b200e21-h (ATCC No. 980812; SEQ ID NOS: 10-11) was deposited at the American Type Culture Collection (ATCC), 10801 University Blvd., Manassas, Va. 20110-2209 U.S.A., on Dec. 30, 1997. Clone b527d12-h (ATCC No. 980720; SEQ ID NOS: 5-9) was deposited at the American Type Culture Collection (ATCC), 10801 University Blvd., Manassas, Va. 20110-2209 U.S.A., on Oct. 2, 1998. These sequences are unique reagents that can be used by one skilled in the art to identify DNA probes for the Zmax1 gene, PCR primers to amplify the gene, nucleotide polymorphisms in the Zmax1 gene, or regulatory elements of the Zmax1 gene.

### Example 3

### Yeast-2 Hybrid Screen for Peptide Aptamer Sequences to Dkk-1

[0742] Peptide aptamer library construction. A peptide aptamer library, Tpep, was constructed, which provides a means to identify chimeric proteins that bind to a protein target (or bait) of interest using classic yeast two hybrid (Y2H) assays. The Tpep library is a combinatorial aptamer library composed of constrained random peptides, expressed within the context of the disulfide loop of E. coli thioredoxin (trxA), and as C-termini fusion to the S. cerevisiae Ga14 activation domain. The Tpep library was generated using a restriction enzyme modified recombinant Y2H prey vector, pPC86 (Gibco), which contains the trxA scaffold protein.

[0743] Generation of aptamer-encoding sequences. Aptamer-encoding sequences were produced as follows. DNA encoding random stretches of approximately sixteen amino acids surrounded by appropriate restriction sites were generated by semi-random oligonucleotide synthesis. The synthetic oligonucleotides were PCR-amplified, restriction digested, and cloned into the permissive sites within the trkA scaffold protein. The cloning strategy was to insert the random oligonucleotide sequence is in-frame with the scaffold protein coding sequence, resulting in expression of a scaffold protein-aptamer chimera. The scaffold protein is itself in-frame with the activation domain of Ga14, within the pPC86 vector that is appropriate for the aptamer to be expressed and functional in a regular Y2H assay. Additional methods of preparing aptamers would be apparent to the skilled artisan.

[0744] Generation of a permissive recombinant pPC86 vector containing the trxA coding sequence. First the RsrII restriction site located within the Ga14 activation domain of pPC86 (Gibco) was eliminated by site-directed mutagenesis (Quickchange™ kit, Stratagene). The amino acid sequence of the Ga14 activation domain was unchanged by this modification. The strength of different control interactions was verified to be unchanged by the modification.

[0745] Second, the E. coli trxA coding sequence was cloned into the SalI and NotI sites of the RsrII-modified pPC86. EcoRI and SpeI sites were then introduced within the trxA RsrII site. The oligonucleotides encoding the peptide aptamers were cloned into the EcoRI and SpeI sites of the resulting vector.

TABLE 13

| | | SEQ ID | Length |
|---|---|---|---|
| Contig | ATCC No. | NO. | (base pairs) |
| b527d12-h_contig302G | 980720 | 5 | 3096 |
| b527d12-h_contig306G | 980720 | 6 | 26928 |
| b527d12-h_contig307G | 980720 | 7 | 29430 |
| b527d12-h_contig308G | 980720 | 8 | 33769 |
| b527d12-h_contig309G | 980720 | 9 | 72049 |
| b200e21-h_contig1 | 980812 | 10 | 8705 |
| b200e21-h_contig4 | 980812 | 11 | 66933 |

### Example 4

### Generation of Antibodies

[0746] In each of the following antibody-generating examples, the synthesis of these linear peptides is followed by injection into two New Zealand Rabbits. Subsequent boosts and bleeds are taken according to a standard ten-week protocol. The end-user receives back 5 mgs of peptide, aliquots of pre-bleeds,.roughly 80 ml of crude sera from each of the two rabbits and, and ELISA titration data is obtained.

[0747] Generation of LRP5 Polymorphism-specific antibodies. Antibodies were generated to the following peptides to obtain antibodies which distinguish the HBM polymorphism versus wild-type LRP5/Zmax: MYWTDWVETPRIE (SEQ ID NO: ) (mutant peptide) and MYWTDWGETPRIE (SEQ ID NO: ) (wild-type peptide for negative selection). Immunofluorescence data confirmed that the antibody, after affinity purification, is specific for HBM and does not recognize LRP5 (FIG. 32).

[0748] Generation of LRP5 Monospecific antibodies. LRP5 monospecific polyclonal antibodies were generated to the following amino acid sequences of LRP5: Peptide 1 (aa. 265-277)-KRTGGKRKEILSA (SEQ ID NO: ), Peptide 2 (a.a. 1178-1194)-ERVEKTTGDKRTRIQGR (SEQ ID NO:), and Peptide 3 (a.a 1352-1375)-KQQCDSFPDCIDGSDE (SEQ ID NO:). Immunofluorescence confirmed that the antibody generated detects LRP5.

[0749] Generation of Dkk-1 monospecific polyconal antibodies. Dkk-1 monospecific polyclonal antibodies were generated to the following amino acid sequences of Dkk-1:
[0750] Peptide 1-GNKYQTIDNYQPYPC (SEQ ID NO: ),
[0751] Peptide 2-LDGYSRRTTLSSKMYHTKGQEG (SEQ ID NO: ),
[0752] Peptide 3-RIQKDHHQASNSSRLHTCQRH (SEQ ID NO: ),
[0753] Peptide 4-RGEIEETITESFGND (SEQ ID NO: ), and
[0754] Peptide 5-EIFQRCGEGLSCRIQKD (SEQ ID NO: ) of human Dkk-1. Western Blots demonstrated that the antibodies generated against peptides 2 and 4 are specific toward Dkk-1.

### Example 5

### Effects of Exogenous Dkk-1 on Wnt-Mediated Signaling in the Xenopus Embryo Assay

[0755] Xenopus embryos are an informative and well-established in vivo assay system to evaluate the modulation of Wnt signaling (McMahon et al., 1989 Cell 58: 1075-84; Smith et al., 1991 reviewed in Wodarz and Nusse, 1998).

[0756] Modification of the Wnt signaling pathway can be visualized by examining the embryos for a dorsalization phenotype (duplicated body axis) after RNA injection into the ventral blastomere at the 4- or 8-cell stage. On the molecular level, phenotypes can be analyzed by looking for expression of various marker genes in stage 10.5 embryos. Such markers would include general endoderm, mesoderm, and ectoderm markers as well as a variety of tissue-specific transcripts.

[0757] Analysis can be done by RT-PCR/TaqMan® and can be done on whole embryo tissue or in a more restricted fashion (microdissection). Because this system is very flexible and rapid, by injecting combinations of transcripts, such as HBM and different Wnts or Wnt antagonists, the mechanism of HBM in the Wnt pathwaycan thereby be dissected. Furthermore, investigations are conducted to determine whether Zmax/LRP5 and HBM differentially modulate Wnt signaling either alone, or in combination with other components. Previous studies have demonstrated that LRP6 alone or LRP5+Wnt5a were able to induce axis duplication (dorsalization) in this system (Tamai et al., 2000 Nature 407: 530-35).

[0758] Constructs for Xenopus Expression (Vector pCS2⁺). Constructs were prepared using the vector pCS2⁺. DNA inserts were subcloned in the sense orientation with respect to the vector SP6 promoter. The pCS2⁺ vector contains an SV40 virus polyadenylation signal and T3 promoter sequence (for generation of antisense mRNA) downstream of the insert.

[0759] Full length Zmax/LRP5 and HBM ORF cDNA: Insert cDNA was isolated from the full length cDNA retrovirus constructs (with optimized Kozak sequences) by BglII-EcoRI digestion and subcloned into the BamHI-EcoRI sites of the pCS2⁺ vector. cDNAs encoding a HBM-like molecule could be subcloned into pCS2⁺ vectors and processed similarly by one of ordinary skill.

[0760] Full length XWnt8: This cDNA was PCR amplified from a Xenopus embryo cDNA library using oligos 114484 (SEQ ID NO: ) (5′-CAGTGAATTCACCATGCAAAACACC ACTTTGTTC-3′) and 114487 (SEQ ID NO: ) (5′-CAGTTGCGGCCGCTCATCTCCGGTG GCCTCTG-3′). The oligos were designed to amplify the ORF with a consensus Kozak sequence at the 5′ end as determined from GenBank #X57934. PCR was carried out using the following conditions: 96° C, 45 sec.; 63° C., 45. sec.; 72° C., 2 min. for 30 cycle. The resulting PCR product was purified, subcloned into pCRII-TOPO (Invitrogen Corp.), sequence verified, and digested with BamHI/XhoI. This insert was subcloned into the vector at the BamHI-XhoI sites.

[0761] Full length Wnt5a: A murine Wnt5a cDNA clone was purchased from Upstate Biotechnology (Lake Placid, N.Y.) and subcloned into the EcoRI site of the vector. Sequencing confirmed insert orientation.

[0762] Full length human Dkk-1: A human cDNA with GenBank accession number AF127563 was available in the public database. Using this sequence, PCR primers were designed to amplify the open reading frame with a consensus Kozak sequence immediately upstream of the initiating ATG. Oligos 117162 (SEQ ID NO: ) (5′-CAATAGTCGACGAATTCACCATGGCTCTGGGCGCAGCGG-3′) and 117163 (SEQ ID NO: ) (5′-GTATTGCGGCCGCTCTAGATTAGTGTCTCTGACAAGTGTGAA-3′) were used to screen a human uterus cDNA library by PCR. The resulting PCR product was purified, subcloned into pCRII-TOPO (Invitrogen Corp.), sequence verified, and digested with EcoRI/XhoI. This insert was subcloned into the pCS2⁺ vector at the EcoRI-XhoI sites.

[0763] Full length human Dkk-2: A full length cDNA encoding human Dkk-2 was isolated to investigate the specificity of the Zmax/LRP5/HBM interaction with the Dkk family of molecules. Dkk-1 was identified in yeast as a potential binding partner of Zmax/LRP5/HBM. Dkk-1 has also been shown in the literature to be an antagonist of the Wnt signaling pathway, while Dkk-2 is not (Krupnik et al., 1999). The Dkk-2 full length cDNA serves as a tool to discriminate the specificity and biological significance of Zmax/LRP5/HBM interactions with the Dkk family (e.g., Dkk-1, Dkk-2, Dkk-3, Dkk-4, Soggy, their homologs and variant, etc.). A human cDNA sequence for Dkk-2 (GenBank Accession No. NM_{—}014421) was available in the public database. Using this sequence, PCR primers were designed to amplify the open reading frame a consensus Kozak sequence immediately upstream of the initiating ATG. Oligos 51409 (SEQ ID NO: ) (5′-CTAACGGATCCACCATGGCCGCGTTGATGCGG-3′) and 51411 (SEQ ID NO: ) (5′-GATTCGAATTCTCAAATTTTCTGACACACATGG-3′) were used to screen human embryo and brain cDNA libraries by PCR. The resulting PCR product was purified, subcloned into pCRII-TOPO, sequence verified, and digested with BamHI/EcoRI. This insert was subcloned into the pCS2⁺ vector at the BamHI/EcoRI sites.

[0764] Full length LRP6 was isolated from the pED6dpc4 vector by XhoI-XbaI digestion. The full length cDNA was reassembled into the XhoI-XbaI sites of pCS2⁺. Insert orientation was confirmed by DNA sequencing.

[0765] mRNA Synthesis and Microinjection Protocol. mRNA for microinjection into Xenopus embryos is generated by in vitro transcription using the cDNA constructs in the pCS2⁺ vector described above as template. RNA is synthesized using the Ambion mMessage mMachine high yield capped RNA transcription kit (Cat. #1340) following the manufacturer's specifications for the Sp6 polymerase reactions. RNA products were brought up to a final volume of 50 μl in sterile, glass-distilled water and purified over Quick Spin Columns for Radiolabeled RNA Purification G50-Sephadex (Roche, Cat. #1274015) following the manufacturer's specifications. The resulting eluate was finally extracted with phenol:chloroform:isoamyl alcohol and isopropanol precipitated using standard protocols (Sambrook-et al., 1989). Final RNA volumes were approximately 50 μl. RNA concentration was determined by absorbance values at 260 nm and 280 nm. RNA integrity was visualized by ethidium bromide staining of denaturing (formaldehyde) agarose gel electrophoresis (Sambrook et al., 1989). Various amounts of RNA (2 pg to 1 ng) are injected into the ventral blastomere of the 4- or 8-cell Xenopus embryo. These protocols are described in Moon et al., 1989 Technique-J. of Methods in Cell & Mol Biol. 1: 76-89; and Peng, 1991 Meth. Cell. Biol. 36: 657-62.

[0766] Screening for Duplicated Body Axis. In vitro transcribed RNA is purified and injected into a ventral blasomere of the 4- or 8-cell Xenopus embryo (approx. 2 hours post-fertilization). At stage 10.5 (approx. 11 hours post-fertilization), the injected embryos are cultured for a total of 72 hours and then screened for the presence of a duplicated body axis (dorsalization) (FIG. 33). Using XWnt8-injected (2-10 pg) as a positive control (Christian et al., 1991) and water-injected or non-injected embryos as negative controls, we replicated the published observation that Zmax(LRP5)+Wnt5a (500 and 20 pg, respectively) could induce axis duplication. Wnt5a (20 pg) alone could not induce axis duplication (as previously reported by Moon et al., 1993). We have also injected GFP RNA (100-770 pg) as a negative control to show that the amount of RNA injected is not perturbing embryo development (not shown). Strikingly, HBM+Wnt5a (500 and 20 pg, respectively) yielded an approximately 3.5 fold more robust response of the phenotype (p=0.043 by Fisher's exact test) compared to Zmax(LRP5)+Wnt5a, suggesting that the HBM mutation is activating the Wnt pathway (FIGS. 34 and 35). The HBM(Wnt5a embryos also appear to be more “anteriorized” than the Zmax(LRP5)/Wnt5a embryos, again suggestive of a gain-of-function mutation.

[0767] The role of Dkk-1 as a modulator of Zmax/LRP5- and HBM-mediated Wnt signaling was investigated. Literature reports have previously characterized Xenopus and murine Dkk-1 as antagonists of the canonical Wnt pathway in the Xenopus system (Glinka et al., 1998 Nature 391: 357-62). Using the human Dkk-1 construct, a dose-response assay was performed to confirm that our construct was functional and to identify the optimal amount of RNA for microinjection. Using 250 pg/embryo of hDkk-1 RNA, over 90% (p<0.001) of the embryos were observed to display enlarged anterior structures (big heads) as anticipated from the published reports (FIG. 36).

[0768] The mechanism of hDkk-1 modulation of Wnt signaling in the presence of Zmax/LRP5 or HBM was also investigated. Without any hDkk-1 present, it was confirmed that HBM+Wnt5a was a more potent activator of Writ signaling than Zmax/LRP5+Wnt5a (p<0.05). Interestingly, in the presence of hDkk-1 (250 pg), Zmax/LRP5-mediated Wnt signaling was repressed (p<0.05) but hDkk-1 was unable to repress HBM-mediated Wnt signaling (p<0.01) (FIG. 37). The specificity of this observation can be further addressed by investigating other members of the Dkk family, other Wnt genes, LRP6, additional Zmax/LRP5 mutants, and the peptide aptamers.

### Example 6

### Effects of Exogenous Dkk and LRP5 on Wnt Signaling in the TCF-Luciferase Assay

[0769] Wnt activity can be antagonized by many proteins including secreted Frizzled related proteins (SFRPs), Cerberus, Wnt Inhibitory Factor-1 and Dkk-1 (Krupnik et al., 1999). The Dkk family of proteins consists of Dkk-1-4 and Soggy, a Dkk-3-like protein. Dkk-1 and Dkk-4 have been shown to antagonize Wnt mediated Xenopus embryo development, whereas Dkk-2, Dkk-3, and Soggy do not. Unlike many of these proteins that antagonize Wnt activity by directly interacting with- Wnt proteins, Dkk-1 acts by binding to two recently identified Wnt coreceptors, LRP5 and LRP6 (Mao et al., 2001; Bafico et al., 2001). The details of this interaction have been examined by the present inventors and Mao et al. using deletion constructs of LRP6, which demonstrated that EGF repeats 3 and 4 are important for Dkk-1 interaction. Accordingly, the activity of two Dkk proteins, Dkk-1 and Dkk-2, were investigated with various Wnt members, LRP5, LRP6, and the mutant form of LRP5, designated HBM. The present invention explores whether there is any functional difference between LRP5 and HBM with regard to Dkk action on Wnt mediated signaling. Various reagents were developed, including Dkk-1 peptides, constrained LRP5 peptide aptamers, constrained Dkk-1 peptide aptamers and polyclonal antibodies to Dkk-1 (in Example 4 above) to identify factors that mimic HBM mediated Wnt signaling.

[0770] Methods. Various LRP5 constrained peptides were developed. Specifically, four peptides that interact with the LBD of LRP5 (FIG. 38,constructs OST259-262 in FIG. 39) and three peptides that interact with the cytoplasmic domain of LRP5 (constructs OST266-OST268 in FIG. 39). In addition two Dkk-1 peptides were developed: constructs OST264 and OST265 in FIG. 39, corresponding to Dkk-1 amino acids 139-266 and 96-245, containing the smallest region of Dkk-1 that interacts with LRP5 (FIG. 40). The cDNA clones encoding the LRP5 LBD interacting peptides and the Dkk-1 peptides were subcloned into pcDNA3.1 with the addition of a Kozak and signal sequence to target the peptide for secretion. The constructs encoding the three peptides interacting with the cytoplasmic domain of LRP5 were also subcloned into pcDNA3.1. However, these latter constructs do not contain a signal sequence.

[0771] HOB-03-CE6 osteoblastic cells developed by Wyeth Ayerst (Philadelphia, Pa.) were seeded into 24-well plates at 150,000 cells per well in 1 ml of the growth media (D-MEM/F12 phenol red-free) containing 10% (v/v) heat-inactivated FBS, 1× penicillin streptomycin, and 1× Glutamax-1, and incubated overnight at 34° C. The following day, the cells were transfected using Lipofectamine 2000® (as described by the manufacturer, Invitrogen) in OptiMEM (Invitrogen) with 0.35 μg /well of LRP5, HBM, or control plasmid DNA (empty vector pcDNA3.1) and either Wnt1 or Wnt3a plasmid DNA. Similar experiments were performed with LRP6 plasmid DNA (0.35 μg/well) or a control pEDdpc4 empty vector. Furthermore, each of these groups were then divided into three groups, those receiving 0.35 μg/well Dkk-1, Dkk-2, or pcDNA3.1 control DNA. All wells were transfected with 0.025 μg/well of CMV beta-galactosidase plasmid DNA and 0.35 μg/well 16× TCF(AS)-luciferase reporter DNA (developed by Ramesh Bhat, Wyeth-Ayerst (Philadelphia, Pa.)). After 4 hours of incubation, the cells were rinsed and 1 ml of fresh growth media was added to each well. The cells were cultured overnight at 34° C., followed by awash and a change of media. Cells were cultured for an additional18-24 hours at 37° C. Cells were then lysed with 50 μl/well of 1× lysis buffer. The extracts were assayed for beta-galactosidase activity (Galacto Reaction Buffer Diluent & Light Emission Accelerator, Tropix) using 5 μl extract+50 μl beta-galactosidase diluent and luciferase activity (Luciferase Assay Reagent, Promega) using 20 μl extract.

[0772] U2OS human osteosarcoma cells were also utilized. U2OS cells (ATCC) were seeded into 96-well plates at 30,000 cells per well in 200 μl of the growth media (McCoy's 5A) containing 10% (v/v) heat-inactivated FBS, 1× penicillin streptomycin, and 1× Glutamax-1, and incubated overnight at 37 ° C. The following day, the media was replaced with OptiMEM (Invitrogen) and cells were transfected using Lipofectamine 2000® (as described by the manufacturer, Invitrogen) with 0.005 μg/well of LRP5, HBM, LRP6 or contol plasmid DNA (empty vector pcDNA3.1) and either Wnt1 (0.0025 μg/well) or Wnt3a (0.0025 μg/well) plasmid DNA. In addition, the 16×-(AS) TCF-TK-firefly-luciferase and control TK-renilla luciferase (Promega Corp.) were co-transfected at 0.3 μg/well and 0.06. μg/well respectively in all experiments. Furthermore, each of these groups was then divided into different groups, those receiving 0.05 μg/well Dkk-1, Dkk-2, Dkk3, Dkk1-Alkaline Phosphatase (AP), mutant Dkk-1 (C220A), Soggy or pcDNA3.1 control DNA. In other experiments, cells were co-transfected with 0.005 μg/well of LRP5, 0.0025 μg/well of Wnt1 or Wnt3a (using 0.0025 μg/well of a control pcDNA3.1) with LRP5-interacting aptamers (0.05 μg/well). Cells were cultured for an additional 18-20 hours at 37° C. Culture medium was removed. Cells were cultured for an additional 18-20 hours at 37° C. Culture medium was removed. Cells were then lysed with 100 μl/well of 1× Passive Lysis Buffer (PLB) of Dual Luciferase Reagent lit (DLR-kit-Promega Corp.) 20 μl of the lysates were combined with LARII reagent of DLR-kit and assayed for TCF-firefly luciferase signal in Top Count (Packard) instrument. After measuring the Firefly readings, 100 μl of the “Stop and Glo” reagent of DLR kit that contains a quencher and a substrate for renilla luciferase was added into each well. Immediately the renilla luciferase reading was measured using the Top Count (Packard) Instrument. The ratios of the TCF-firefly luciferase to control renilla readings were calculated for each well and the mean ratio of triplicate or more wells was expressed in all data.

[0773] Results. The results of these experiments demonstrate that Dkk-1, in the presence of Wnt1 and LRP5, significantly antagonized TCF-luciferase activity (FIG. 41). In marked contrast, Dkk-1 had no effect on HBM/Wnt1 mediated TCF-luciferase activity (FIG. 41). In similar experiments, Dkk-1 was also able to antagonize LRP5/Wnt3a but not HBM/Wnt3a mediated TCF-luciferase activity (FIG. 42). These results indicate that the HBM mutation renders Dkk-1 inactive as an antagonist of Wnt1 and Wnt3a signaling in HOB03CE6 osteoblastic cells. In other experiments with Wnt1, Dkk-1 had no effect on LRP5 or HBM mediated TCF-luciferase activity (FIG. 41). In contrast, with either LRP5 or HBM in the presence of Wnt3 a, Dkk-2 was able to antagonize the TCF-luciferase activity (FIG. 42). These latter results indicate that the HBM mutation has no effect on Dkk-2 action in the presence of Wnt3a. Experiments were also performed using the closely related LRP6 cDNA in HOB-03-CE6 cells. In these experiments, LRP6/Wnt1 and LRP6/Wnt3a mediated TCF-luciferase were regulated in the same manner as LRP5. Specifically, Dkk-1 antagonized LRP6/Wnt1 mediated TCF-luciferase activity, whereas Dkk-2 had no effect (FIG. 41). However, similar to the action of Dkk-2 with LRP5/Wnt3a, Dkk-2 was able to antagonize LRP6/Wnt3a mediated TCF-luciferase activity (FIG. 42).

[0774] The results in the U2OS cells show a robust effect of the OST262 LRP5 peptide aptamer activation of Wnt signaling in the presence of Wnt3a (FIG. 43). These functional results are confirmed by the results shown below in Example 7 using LRP5 peptide aptamers in the Xenopus assay. Such results affirmatively demonstrate that the effects of small molecules on LRP5/LRP6/HBM signaling can be detected using the TCF-luciferase assay.

[0775] These data demonstrate that there is a functional difference between LRP5 and HBM regarding the ability of Dkk-1 to antagonize Wnt1 and Wnt3a signaling. These data and previous data showing that Dkk-1 directly interacts with LRP5 suggests that the inability of Dkk-1 to antagonize HBM/Wnt signaling may in part contribute to the HBM phenotype. These experiments further demonstrate the ability to test various molecules (e.g., small molecules, aptamers, peptides, antibodies, LRP5 interacting proteins or Dkk-1 interacting proteins, and the like) for a LRP5 ligand that mimics HBM mediated Wnt signaling or factors that block Dkk-1 interaction with LRP5.

[0776] This was the assay that was used to show the responsiveness of two HBM-like variants. See FIGS. 29 and 30. The data also demonstrates that these variants are less susceptible to modulation by Dkk.

### Example 7

### Cell-Based Functional High-Throughput Assay

[0777] To develop a high throughput assay, the TCF-luciferase assay described in Example 6 was modified utilizing low level expression of endogenous LRP5/6 in U2OS and HEK293 cells. However, HOB-03-CE6 cells and any other cells which show a differential response to Dkk depending on whether LRP5, LRP6 or HBM are expressed. Using U2OS (human osteosarcoma) and HEK293 (ATCC) cells, the TCF-luciferase and tk-Renilla reporter element constructs were co-transfected along with Wnt3a/1 and Dkk. Wnt3a alone, by using endogenous LRP5/6, was able to stimulate TCF reporter gene activation. When Dkk, is co-transfected with Wnt3a/Wnt 1 and reporters (TCF-luci and tk-Renilla), Dkk represses reporter element activity. In addition, the TCF-luci signal is activated by Wnt3a/Wnt1 can be repressed by the addition of Dkk-enriched conditioned media to the cells containing Wnt3a/Wnt1 and reporters. The assay is further validated by the lack of TCF-reporter inhibition by a point mutant construct (C220A) of Dkk1.

[0778] The Dkk-mediated repression of the reporter is dependent upon the concentration of transfected Dkk cDNA or on the amount of Dkk-conditioned media added. In addition, the Dkk-mediated reporter suppression can be altered by the co-transfection of LRP5, LRP6, and HBM cDNAs in the U2OS or HEK293 cells. In general, U2OS cells show greater sensitivity to Dkk-mediated reporter suppression than that in HEK-293 cells. In U2OS cells, the transfection of LRP5/LRP6/HBM/HBM-like cDNA leads to moderate activation of TCF-luci in the absence of Wnt3a/Wnt1 transfection. This activation presumably utilizes the endogenous Wnts present in U2OS cells. Under this condition, Dkk1 can repress TCF-luci and shows a differential signal between LRP5 and HBM. By co-transfecting Wnt3a/Wnt1, there is a generalized increase in the TCF-luci signal in the assay. Further, one can detect Dkk-mediated differential repression of the reporter due to LRP5 and HBM cDNA expression as well as between LRP5 and LRP6 cDNA. The repression is maximal with LRP6, moderate with LRP5, and least with HBM cDNA expression. In addition, the assay can detect the functional impact of the LRP5 interacting peptide aptamers (FIG. 38), Dkk1 interacting aptamers and binding domains of Dkk-1 (FIG. 40; OST264 and OST265 of FIGS. 39 and 44).

[0779] Using this system with a suppressed Wnt-TCF signal due to the presence of both Dkk and Wnt3a, one can screen for compounds that could alter Dkk modulation of Wnt signaling, by looking for compounds that activate or the TCF-luciferase reporter, and thereby relieve the Dkk-mediated repression of the Wnt pathway. Such compounds identified may potentially serve as HBM-mimetics and be useful, for example, as osteogenic therapeutics. Data generated from this high throughput screen are demonstrated in FIGS. 4547. FIG. 45 shows that Dkk1 represses Wnt3a-mediated signaling in U2OS bone cells. FIG. 46 demonstrates the functional differences between LRP5, LRP6, and HBM. Dkk-1 represses LRP6 and LRP5 but has little or no effect on HBM-generated Wnt1 signaling in U2OS cells. FIG. 47 demonstrates the differential effects of various Dkk family members and modified Dkks, including Dkk-1, a mutated Dkk-1 (C220A), Dkk-1-AP (modified with alkaline phosphatase), Dkk-3, and Soggy.

### Example 8

[0780] DKK/LRP5/6/HBM/HBM-like ELISA Assay

[0781] A further method to investigate Dkk binding to LRP or HBM and HBM like polypeptides is via ELISA assay. Two possible permutations of this assay are exemplified. LRP5 is immobilized to a solid surface, such as a tissue culture plate well. One skilled in the art will recognize that other supports such as a nylon or nitrocellulose membrane, a silicon chip, a glass slide, beads, etc. can be utilized. In this example, the form of LRP5 used is actually a fusion protein where the extracellular domain of LRP5 is fused to the Fc portion of human IgG. The LRP5-Fc fusion protein is produced in CHO cell extracts from stable cell lines. The LRP5-Fc fusion protein is immobilized on the solid surface via anti-human Fc antibody or by Protein-A or Protein G-coated plates, for example. The plate is then washed to remove any non-bound protein. Conditioned media containing secreted Dkk protein or secreted Dkk-epitope tagged protein (or purified Dkk or purified Dkk-epitope tagged protein) is incubated in the wells and binding of Dkk to LRP is investigated using antibodies to either Dkk or to an epitope tag. Dkk-V5 epitope tagged protein would be detected using an alkaline phosphatase tagged anti-V5 antibody.

[0782] Alternatively, the Dkk protein could be directly fused to a detection marker, such as alkaline phosphatase. Here the detection of the Dkk-LRP interaction can be directly investigated without subsequent antibody-based experiments. The bound Dkk is detected in an alkaline phosphatase assay. If the Dkk-alkaline phosphatase fusion protein is bound to the immobilized LRP5, alkaline phosphatase activity would be detected in a colorimetric readout. As a result, one can assay the ability of small molecule compounds to alter the binding of Dkk to LRP using this system. Compounds, when added with Dkk (or epitope-tagged Dkk) to each well of the plate, can be scored for their ability to modulate the interaction between Dkk and LRP based on the signal intensity of bound Dkk present in the well after a suitable incubation time and washing. The assay can be calibrated by doing cold competition experiments with unlabeled Dkk or with a second type of epitope-tagged Dkk. Any small molecule that is able to modulate the Dkk-LRP interaction may be a suitable therapeutic candidate, more preferably an osteogenic therapeutic candidate.

### Example 9

### Functional Evaluation of Peptide Aptamers in Xenopus

[0783] The constrained peptide aptamers constructs OST258-263 (where 258 contains the signal sequence by itself and 263 contains an irrelevant constrained peptide) (FIGS. 39 and 44) were used to generate RNA substantially as described in Example 6, except the vector was linearized by restriction endonuclease digestion and RNA was generated using T7 RNA polymerase.

[0784] Aptamer RNA was injected at 250 pg per blastomere using the protocol of Example 6. Wnt signaling was activated, as visualized by embryo dorsalization (duplicated body axis) with aptamers 261 and, more strongly, 262. The results of this assay are shown in FIGS. 48 and 49. These results suggest that aptamers 261 and 262 are able to activate Wnt signaling possibly by binding to the LBD of LRP, thereby preventing the modulation of LRP-mediated signaling by Dkk.

[0785] The aptamers of the present invention can serve as HBM-mimetics. In the Xenopus system they are able to induce Wnt signaling all by themselves. They may also serve as tools for rational drug design by enhancing the understanding of how peptides are able to interact with LRP and modulate Wnt signaling at the specific amino acid level. Thus, one would be able to design small molecules to mimic their effects as therapeutics. In addition, the aptamers identified as positives in this assay may be used as therapeutic molecules themselves.

### Example 10

### Homogenous Assay

[0786] An excellent method to investigate perturbations in protein-protein interactions is via Fluorescence Resonance Energy Transfer (FRET). FRET is a quantum mechanical process where a fluorescent molecule, the donor, transfers energy to an acceptor chromophore molecule which is in close proximity. This system has been successfully used in the literature to characterize the intermolecular interactions between LRP5 and Axin (Mao et al., Molec. Cell Biol. 7: 801-9). There are many different fluorescent tags available for such studies and there are several ways to fluorescently tag the proteins of interest. For example, CFP (cyan fluorescent protein) and YFP (yellow fluorescent protein) can be used as donor and acceptor, respecively. Fusion proteins, with a donor and an acceptor, can be engineered, expressed, and purified.

[0787] For instance, purified LRP protein, or portions or domains thereof, fused to CFP and purified Dkk protein, or portions or domains thereof that interact with Dkk or LRP respectively, fused to YFP can be generated and purified using standard approaches. If LRP-CFP and Dkk-YFP are in close proximity, the transfer of energy from CFP to YFP will result in a reduction of CFP emission and an increase in YFP emission. Energy is supplied with an excitation wavelength of 450 nm and the energy transfer is recorded at emission wavelengths of 480 nm and 570 nm. The ratio of YFP emission to CFP emission provides a guage for changes in the interaction between LRP and Dkk. This system is amenable for screening small molecule compounds that may alter the Dkk-LRP protein-protein interaction. Compounds that disrupt the interaction would be identified by a decrease in the ratio of YFP emission to CFP emission. Such compounds that modulate the LRP-Dkk interaction would then be considered candidate HBM mimetic molecules. Further characterization of the compounds can be done using the TCF-luciferase or Xenopus embryo assays to elucidate the effects of the compounds on Wnt signaling.

[0788] While the above example describes a cell-fee, solution-phase assay using purified components, a similar cell-based assay could also be performed. For example, LRP-CFP fusion protein can be expressed in cells. The Dkk-YFP fusion protein then could be added to the cells either as purified protein or as conditioned media. The interaction of LRP and Dkk is then monitored as described above.

### Example 11

### Identification of Variants of LRP5/Zmax1/HBM.

[0789] Because the YWTD repeats constitute the major part of domain which interacts with Dkk-1, a search was begun from the repeats to look for protein folds that contain such repeats. Springer, 1998 J. Mol. Biol. 283: 837-62 proposed that these YWTD repeats, which had been previously described as “spacers” and considered to have no defined structure, are in fact the propeller-blade subdomains of highly structured six-bladed β-propellers. Springer (1998) therefore proposed two theoretically modeled protein structures with such YWTD repeats.

[0790] The Model. A set of LRP5 propeller domain sequences from mouse and human were assembled and aligned using CLUSTALW, together with the sequences corresponding to two of the modeled YWTD-propeller structures of Springer (1998) [11 px, based on the LRP1 β-propeller domain no. 7 from chicken (SwissProt LRP1_CH7), and 1ndx, based on human nidogen (Swiss-Prot NIDO_HU1)]. The alignment was manually edited based on the rationale and knowledge of protein structures. FIG. 50 depicts a schematic model of LRP5. The secondary structures consist exclusively of β-strands and turns. The secondary structure assignments were verified by the predictive program, DSC (Discrimination of Protein Secondary Structure Class available at http://bioweb.pasteur.fr/seqanal/interfaces/dsc.html). Preliminary checks of the exon-intron boundaries were performed manually. A tertiary-structure homology model for human LRP5 using the 11 px model as a template was built with InsightII (Accelrys Inc., San Diego, Calif.) and examined using the graphics display programs from Insight II and Rasmol (freely available at http ://www.umass.edu/microbio/rasmol/index2.html).

[0791] Results. Based on the homology alignments and modeling, the domain diagram of LRP5 in FIG. 50 was obtained. FIG. 51 shows the complete alignment and secondary structure assignments for the propeller domains of mouse LRP5 and LRP6, human LRP5 and human LRP6, and the sequences corresponding to the two theoretical models constructed by Springer (1998).

[0792] To a good first approximation, the sequence alignments support the proposal that there are four 6-bladed β-propeller domains in human LRP5. This model nicely accommodates the sequence (as should be expected since it derives from a carefully constructed model of a chicken LRP propeller domain).. The overall shape of this domain resembles a disk with inward-sloping sides and a hole down the middle. The polypeptide chain enters and leaves from the same (comparatively flat) “bottom” surface. As indicated in the alignment (FIG. 51) and in several of the structure illustrations, the G171V mutation falls into a loop on the outer or “top” face of the domain. This immediately suggests that—contrary to what one might expect, given the role of highly conserved glycine residues in determining protein folds—the mutation should not have any significant effect on the domain's tertiary structural stability. It is rather more likely that the mutation interferes with binding of some ligand, possibly a macromolecule (Smith et al., 1999 Trends Biochem. Sci. 24: 181-5) or alters a protein-protein interaction.

[0793] Closer scrutiny of the protein in the vicinity of G171 shows that this residue sits at the bottom of a pocket on the outer edge of the top surface of the domain. Moreover, one side of this pocket consists of a cluster of very hydrophobic side chains, while the other side has more polar groups, most notably glutamate 172. In the mutant form of the protein, with V171 in place of the glycine, the pocket largely disappears as the isopropyl group of valine replaces the hydrogen side chain of glycine. It is easy to understand how such a substitution could seriously disrupt ligand binding if the ligand normally protrudes into the pocket. By the same rationale, any other mutations that block such pockets in any of the four propellers could also result in impaired ligand binding.

[0794] The reasonableness of the proposed model is based on Springer's results as well as additional data. For example, data derived from the typical features of such protein domains (including the well-studied YWTD repeats), e.g., that are robust and rigid tertiary structures. Loop conformations may vary somewhat, especially for the longer loops, but the basic features of the protein scaffold are almost certainly well predicted. Of course we would be on somewhat more secure ground if there were a crystal structure for one of these domains. That naturally implies that some of the more interesting features, such as the identity of residues exposed on the outer, putative ligand-binding surface, will also be well-predicted. Note that in FIG. 51 these residues are marked in red on the sequences corresponding to Springer's (1998) models. Even though different models could possibly be built that are not dependent on Springer's assumptions and lead to a different topology of the propeller, this would not alter the conclusion that the G171V mutation lies in a surface loop.

[0795] At the very least, the model affords an opportunity to think about this protein in molecular terms and that should facilitate both experimental design and evaluation of results, i.e., candidate epitopes might be selected more rationally. One interesting aspect, evoked forcefully by the diagram in FIG. 50, is the question of how the different modular propeller domains interact. The EGF-like domains are well-studied (dozens of crystal and NMR structures exist, see for example Bork et al., 1996 Quart. Rev. Biophys. 29: 119-67). The EGF-like domains consist mainly of a couple of β-hairpins, cross-linked by disulfide bonds, and in some cases they have tightly bound calcium ions, which must further stabilize their structure. Interestingly, in contrast to the YWTD propellers, the EGF-like domains have the polypeptide chain entering at one end and exiting at the other. Thus, mechanically, these domains could act as spacers, even swivels (since rotation can occur around the tails that extend from either end). Given the size of the propellers, there are almost certainly inter-domain interactions between them as they assemble in some higher-order structure, connected by the EGF-like domains. Because of the topology of the propellers, their “top” faces would have to face outward since the EGF-like domains will tie them together by their protruding N- and C-terminal extensions.

[0796] A more sophisticated analysis of the β-propeller structure was modeled using X-ray crystallographic data from the LDL receptor. The primary amino acid sequences of the various beta propeller domains of LRP5 (and other domains) were used to develop homology models of their 3-dimensional structures according to the following method:
[0797] (A) Search for suitable structural templates and check sequence identity with target. The ExNRL-3D database (derived from the Protein Data Bank (http://pdb.ccdc.cam.ac.uk/pdb/) was searched using BLASTP2 (Altschul et al., 1990 J. Mol. Biol. 215: 403-10; Huang et al., 1991 Adv. Appl. Math. 12: 337-67; and Peitsch, 1995 PDB Quart. Newsletter 72: 4) to find all similarities of the target sequence with sequences of known structure. This program selects all templates with sequence identities above 25% and projected model size greater than 20 residues. This step also detects domains that can be modelled based on unrelated templates. Use of this step resulted in the selection of Protein Data Bank (PDB) structure, 1IJQ (“Crystal Structure Of The LDL Receptor YWTD-EGF Domain Pair”) (Jeon et al., 2001 Nat. Strict. Biol. 8: 499).
[0798] (B) Create ProModII (Altschul et al., 1990; Huang et al., 1991; and Peitsch, 1995) jobs and generate models with ProModII.
[0799] (C) Superimpose related 3D structures. This method is based upon the diagonals of sequence similarity (the Dynaminc sequence alignment algorithm (SIM)(Altschul et al., 1990; Huang et al., 1991; and Peitsch, 1995). Specifically, the following steps are performed:
   [0800] (i) Primary match: Regions with sequence similarity are selected automatically (manual selection is also possible) and the corresponding residues matched in three-space. (ii) The primary match is further refined using expanding context spheres.
[0801] (D) Generate a multiple alignment comprising the sequences to be modeled.
[0802] (E) Generate a framework for the new sequence.
[0803] (F) Based on the topological arrangement of corresponding atoms: (a) atoms which occupy a similar portion of space and are expected to have a structural counterpart in the new structure are used to compute the framework coordinates (averaged positions); (b) Side chains with fully incorrect geometries are removed.
[0804] (G) Rebuild the lacking loops based on the geometry of the loop stems: (a) the stems of the loops to rebuild are used to scan a database of structural fragments derived from the Brookhaven Data Bank. Either the best fitting fragment or a framework derived from the five best fragments, is used as the new loop, or (b) the conformational space is searched using a CSP approach (seven allowed Φ-Ψ angle combinations, space allocation for the loop, space allocation for each α-carbon in the loop). Both methods will place only α-carbons when loops are in steric conflict with the surrounding context.
[0805] (H) Rebuilt incomplete backbones based on the position of the a-carbons, the backbone was rebuilt using a set of seven allowed Φ-Ψ angle combinations and a database of backbone fragments (a sliding window of five residues was run through the protein sequence. The best matching backbone fragment for each overlapping pentapeptide was then stored. A framework for the main chain atoms is derived from these peptides, using only the coordinates of the three central residues of each pentapeptide.
[0806] (I) The model's structural quality is verified and packing is checked as follows:
   [0807] (i) Verification of structural quality is based on the method described by R. Luthy et al., 1992 Nature 356: 83-85. This method analyzes the 3D context of each residue and allows the identification of mis-folded regions.
   [0808] (ii) Packing is checked based on a probe accessible surface (Connoly surface) computation and a cubic grid passed through the structure. Inside and outside surfaces are detected and the center and size of each cavity is computed. The algorithm then compares the size and distribution of these cavities between the model and the structure in order to detect possibly mis-folded regions.
[0809] (J) Refine structure by energy minimization and molecular dynamics based on force field computations following Gromos96 (Methods for the evaluation of long-range electrostatic forces in computer simulations of molecular systems, IN COMPUTER SIMULATION OF B_{IOMOLECULAR} S_{YSTEMS}, T_{HEORETICAL AND} EXPERIMENTAL A_{PPLICATIONS}, Vol. 2, 182-212 (W. F. van Gunsteren et al, eds., Escom Science Publishers, Leiden, The Netherlands, 1993); van Gunsteren et al., 1990 Angew. Chem. Int. Ed. Engl. 29: 992-1023; van Gunsteren et al., 1992 Eur. J. Biochem. 204: 947-961; Torda and W. F. van Gunsteren. Molecular Modeling Using Nuclear Magnetic Resonance Data, IN REVIEWS IN COMPUTATIONAL CHEMISTRY, Vol. III, 143-172 (K. B. Lipkowitz et al., eds., VCH Publishers, Inc. New York, 1992); van Gunsteren, Molecular dynamics and stochastic dynamics simulation: A primer. in COMPUTER SIMULATION OF BIOMOLECULAR SYSTEMS, THEORETICAL AND EXPERIMENTAL APPLICATIONS 3-36; van Gunsteren et al., Computation of free energy in practice: choice of approximations and accuracy limiting factors. IN COMPUTER SIMULATION OF BIOMOLECULAR SYSTEMS, THEORETICAL AND EXPERIMENTAL APPLICATIONS 315-348; Smith et al., Methods for the evaluation of long-range electrostatic forces in computer simulations of molecular systems, IN COMPUTER SIMULATION OF BIOMOLECULAR SYSTEMS, THEORETICAL AND EXPERIMENTAL APPLICATIONS 182-212; van Gunsteren et al., Accounting for Molecular Mobility in Structure Determination Based on Nuclear Magnetic Resonance Spectroscopic and X-Ray Diffraction Data, in Methods IN ENZYMOLOGY: NUCLEAR MAGNETIC RESONANCE, Vol. 239 619-654 (T. L. James et al., eds., Academic Press, New York, 1994); van Gunsteren et al., 1994 Quart. Rev. Biophysics 27: 435-481; van Gunsteren et al., 1995 Biomolecular Modelling: Overview of Types of Methods to Search and Sample Conformational Space, IN PROCEEDINGS OF THE 1_{ST} EUROPEAN CONFERENCE ON COMPUTATIONAL CHEMISTRY, AMERICAN INSTIIITE OF PHYSICS CONF. PROC. 330: 253-268; and van Gunsteren et al., 1995 Computer Phys. Communications 91: 305-319).
[0810] (K) The structure is then manually refined based on sequence alignment and structural elements using Deep View, the SWISS-PDB Viewer (Guex et al., 1997 Electrophoresis 18: 2714-23).

[0811] Uses of structural model. Having a three-dimensional model of the protein domain allows one to appreciate the context of the HBM mutation, or other HBM-like mutations, in three dimensional space. This facilitates the prediction of possible mechanisms of action in a manner impossible in any other way because one cannot predict from primary sequence alone the proximity of one distant (in sequence space) amino acid to another. This also allows one to make functional predictions that can then be tested using molecular/cellular biology techniques to further refine the model and validate the target. For example, the structural model of the G171V mutation predicted an alteration in side chain-side chain interactions, so we were able to use this information to successfully predict similar mutations in other amino acids that would have analogous structural effects. Overlaying other functional data on this model would also able highlight other potentially important regions of the protein domain. Additionally, such models show the accessible residues, which would be useful for developing small compounds, antibodies and the like which recognize and bind to this region.

[0812] Results. Based on the space filling hypothesis set forth in Section 3 above, two residues from blade 6 of propeller 1 were identified as being in structurally equivalent locations to residue 171 in blade 4. Accordingly, substitutions with valine were engineered: F241V and A242V.

[0813] Residues that were predicted to be accessible to the interior surface of the propeller were identified in both blades 3 and 5 of Zmax1 (LRP5). Original predictions from the Springer model identified G199 on blade 5 and E128 on blade 3 as the equivalent position to residue 171 of blade 4 (HBM). Using the more sophisticated model described above, G199 and E128 are not predicted to be in the equivalent position to residue 171 of blade 4. Based on the new, more sophisticated model, the following residues were chosen for valine substitutions:

| Blade No. | Mutations |
|---|---|
| 5 | L200V, T201V and I202V |
| 3 | S127V |

Another residue T125 was selected for a conservative substitution with T125S as well as a less conservative substitution of T125G.

[0815] The role of the YWTD repetitive motifs in the β-propeller was examined by carrying out an alanine replacement scan over this region in Blade 4. These repeats are predicted to create the β-sheet blades of the propeller. Based on this model data, the following additional mutations were prepared in propeller 1: Y164A, M165A, Y166A, W167A, T168A, and D169A. These substitutions would be predicted to be detrimental to the β-propeller structure.

[0816] The spacing filling or occupied space model was further examined by mutating a residue predicted by the above methods to reside on the exterior surface of propellar 1, blade 4. This mutation, K215V (K→V at position 215), was selected because it was believed to not produce an HBM-like effect.

[0817] Based on this information, the following model of the HBM G171V mutation was obtained. Specifically, substitutions of valine at specific locations within propeller 1 could result in the creation of hydrophobic patches on the surface of the propeller. For example, the V at residue 171 of the HBM mutant comes in close proximity to L150 on the adjacent strand, potentially creating a hydrophobic patch that was not present with the wild type G171. An example of this prediction, and others are presented in a separate file (FIG. 52).

[0818] Based on this model, a mutation of L150G which would remove the hydrophobic side chain at this site may not produce an HBM effect. In addition, a double mutant of G171V (HBM) and L150G may not produce an HBM effect due to the elimination of the hydrophobic side chain interactions. The model can also be used to test this prediction on a different propeller 1 blade. The substitution A214V was shown to result in an HBM effect. I194 is the residue that is in the equivalent position to A214 on blade 5 as L150 is to G171 on. blade 4. While the mutation of 194G alone may not be predicted to result an HBM effect, the double mutant of I194G and A214V may no longer permit a hydrophobic patch to form and as a result not generate the HBM effect observed with A214V. Additional analyses of the residues in proximity to A214 that may contribute to the formation of hydrophobic patches identified P240 and F241. Mutations of either P240G or F241G together with A214V may no longer permit the formation of hydrophobic patches and may eliminate the HBM effect observed with A214V alone.

[0819] Lastly, the new model was used to investigate specific aspects of the other three propellers. The relevance of residues R494, R570 and V667 in the three other propellars was investigated. These three residues were chosen since they have been reported to be the site of osteoporosis pseudoglioma disease causing missense mutations: R494Q, R570W and V667M (Gong et al., 2001 Cell 107: 513-523). Based on the structural location of these residues on the outer surface of the propeller, the model would not predict that these substitutions are either gain- or loss-of-function substitutions (FIGS. 53A-C). For example, the mutations, related to osteoporosis-pseudoglioma syndrome (OPPG) result in patients having very low bone mass and who are prone to developing fractures and deformation. This genetic condition is known now to result from mutations in LRP5 (Gong et al, 2001 Cell 107: 513-23). Based on this information, this mutation would be categorized as a loss in function mutation.

[0820] As a result, we have engineered these receptor variant to functionally test. These new receptor variants were generated exactly as described above with the following oligonucleotides:

L150GF
GAAGGTGCTCTTCTGGCAGGACGGTGACCAGCCGAGGGCC
L150GR
GGCCCTCGGCTGGTCACCGTCCTGCCAGAAGAGCACCTTC
I194GF
GATCATTGTGGACTCGGACGGTTACTGGCCCAATGGACTG
I1940R
CAGTCCATTGGGCCAGTAACCGTCCGAGTCCACAATGATC
L200VF
CATTTACTGGCCCAATGGAGTGACCATCGACCTGGAGGAGCAGAAGC
L200VR
GCTTCTGCTCCTCCAGGTCGATGGTCACTCCATTGGGCCAGTAAATG
T201VF
CATTTACTGGCCCAATGGACTGGTCATCGACCTGGAGGAGCAGAAGC
T201VR
GCTTCTGCTCCTCCAGGTCGATGACCAGTCCATTGGGCCAGTAAATG
I202VF
CATTTACTGGCCCAATGGACTGACCGTCGACCTGGAGGAGCAGAAGC
I202VR
GCTTCTGCTCCTCCAGGTCGACGGTCAGTCCATTGGGCCAGTAAATG
T125SF
GGCAAGAAGCTGTACTGGTCGGACTCAGAGACCAACCGCATC
T125SR
GATGCGGTTGGTCTCTGAGTCCGACCAGTACAGCTTCTTGCC
T125GF
GGCAAGAAGCTGTACTGGGGGGACTCAGAGACCAACCGCATC
T125GR
GATGCGGTTGGTCTCTGAGTCCCCCCAGTACAGCTTCTTGCC
S127VF
GAAGCTGTACTGGACGGACGTAGAGACCAACCGCATCGAGGTG
S127VR
CACCTCGATGCGGTTGGTCTCTACGTCCGTCCAGTACAGCTTC
F241VF
CCTGACGCACCCCGTCGCCCTGACGCTCTCCGGGGACACTC
F241VR
GAGTGTCCCCGGAGAGCGTCAGGGCGACGGGGTGCGTCAGG
A242VF
CCTGACGCACCCCTTCGTCCTGACGCTCTCCGGGGACACTC
A242VR
GAGTGTCCCCGGAGAGCGTCAGGACGAAGGGGTGCGTCAGG
K215VF
CTACTGGGCTGACGCCGTGCTCAGCTTCATCCACCGTGCC
K215VR
GGCACGGTGGATGAAGCTGAGCACGGCGTCAGCCCAGTAG
Y164AF
CTTGGACCCCGCTCACGGGGCCATGTACTGGACAGACTGG
Y164AR
CCAGTCTGTCCAGTACATGGCCCCGTGAGCGGGGTCCAAG
M165AF
GGACCCCGCTCACGGGTACGCGTACTGGACAGACTGGGGTG
M165AR
CACCCCAGTCTGTCCAGTACGCGTACCCGTGAGCGGGGTCC
Y166AF
CCCGCTCACGGGTACATGGCCTGGACAGACTGGGGTGAGAC
Y166AR
GTCTCACCCCAGTCTGTCCAGGCCATGTACCCGTGAGCGGG
W167AF
CGCTCACGGGTACATGTACGCGACAGACTGGGGTGAGACGC
W167AR
GCGTCTCACCCCAGTCTGTCGCGTACATGTACCCGTGAGCG
T168AF
GCTCACGGGTACATGTACTGGGCAGACTGGGGTGAGACGCC
T168AR
GGCGTCTCACCCCAGTCTGCCCAGTACATGTACCCGTGAGC
D169AF
CACGGGTACATGTACTGGACAGCCTGGGGTGAGACGCCCCG
D169AR
CGGGGCGTCTCACCCCAGGCTGTCCAGTACATGTACCCGTG
R494QF
CAACTTGGATGGGCAGGAGCAGCGTGTGCTGGTCAATGCCTC
R490QR
GAGGCATTGACCAGCACACGCTGCTCCTGCCCATCCAAGTTG
R570WF
GCAGCGCCGCAGCATCGAGTGGGTGCACAAGGTCAAGGCCAG
R570WR
CTGGCCTTGACCTTGTGCACCCACTCGATGCTGCGGCGCTGC
V667MF
CGAGACCAATAACAACGACATGGCCATCCCGCTCACGGGCG
V667MR
CGCCCGTGAGCGGGATGGCCATGTCGTTGTTATTGGTCTCG

[0821] Point mutations in other molecules with beta-propellers have been described in the literature. For example, alpha4-integrin (Guerrero-Esteo et al., 1998 FEBS Letter 429: 123-8) has had two mutations introduced, which resulted in altered protein function (i.e., G130R and G190S). Both of these glycines are in structurally equivalent locations to G171 of LRP5, just located on different blades of the beta-propeller at the upper surface. Using the model discussed above, we mapped these residues of the alpha4-integrin and confirmed their placement. The result of these substitutions in the alpha4 integrin was loss of ligand binding and reduced affinity to its heterodimer binding partner: integrin-beta1, such that the alpha4-beta1 (α4β1) heterodimer cannot be formed. Examples of modulation of other residues in integrin-alpha4 with functional consequences are referenced within Guerrero-Esteo et al. (1998). Thus, these data support the notion that disruption of beta-propeller structure can result in significant and dramatic effects on receptor function;

[0822] All references cited are herein incorporated by reference in their entirety for all purposes. The following applications are also incorporated by reference in their entirety herein: U.S. application Ser. Nos. 09/543,771 and 09/544,398 filed on Apr. 5, 2000, which are a continuation-in-part of application Ser. No. 09/229,319, filed Jan. 13, 1999, which claims benefit of U.S. Provisional Application No. 60/071,449, filed Jan. 13, 1998, and U.S. Provisional Application No. 60/105,511, filed Oct. 23, 1998. Additionally This application claims priority of Application Nos. 60/290,071 filed May 11, 2001; 60/291,311 filed May 17, 2001; 60/353,058 filed Feb. 1, 2002, and 60/361,293 filed Mar. 4, 2002 the texts of which are herein incorporated by reference in their entirety for all purposes.

The application's sequence listing, which the Patent Office published only in electronic form, follows.

SEQUENCE LISTING (1086 sequences)

SEQ ID NO: 1 - DNA, 5120 bp, Homo sapiens
actaaagcgccgccgccgcgccatggagcccgagtgagcgcggcgcgggcccgtccggccgccggacaacatggaggcagcgccgcccgggccgccgtggccgctgctgctgctgctgctgctgctgctggcgctgtgcggctgcccggcccccgccgcggcctcgccgctcctgctatttgccaaccgccgggacgtacggctggtggacgccggcggagtcaagctggagtccaccatcgtggtcagcggcctggaggatgcggccgcagtggacttccagttttccaagggagccgtgtactggacagacgtgagcgaggaggccatcaagcagacctacctgaaccagacgggggccgccgtgcagaacgtggtcatctccggcctggtctctcccgacggcctcgcctgcgactgggtgggcaagaagctgtactggacggactcagagaccaaccgcatcgaggtggccaacctcaatggcacatcccggaaggtgctcttctggcaggaccttgaccagccgagggccatcgccttggaccccgctcacgggtacatgtactggacagactggggtgagacgccccggattgagcgggcagggatggatggcagcacccggaagatcattgtggactcggacatttactggcccaatggactgaccatcgacctggaggagcagaagctctactgggctgacgccaagctcagcttcatccaccgtgccaacctggacggctcgttccggcagaaggtggtggagggcagcctgacgcaccccttcgccctgacgctctccggggacactctgtactggacagactggcagacccgctccatccatgcctgcaacaagcgcactggggggaagaggaaggagatcctgagtgccctctactcacccatggacatccaggtgctgagccaggagcggcagcctttcttccacactcgctgtgaggaggacaatggcggctgctcccacctgtgcctgctgtccccaagcgagcctttctacacatgcgcctgccccacgggtgtgcagctgcaggacaacggcaggacgtgtaaggcaggagccgaggaggtgctgctgctggcccggcggacggacctacggaggatctcgctggacacgccggacttcaccgacatcgtgctgcaggtggacgacatccggcacgccattgccatcgactacgacccgctagagggctatgtctactggacagatgacgaggtgcgggccatccgcagggcgtacctggacgggtctggggcgcagacgctggtcaacaccgagatcaacgaccccgatggcatcgcggtcgactgggtggcccgaaacctctactggaccgacacgggcacggaccgcatcgaggtgacgcgcctcaacggcacctcccgcaagatcctggtgtcggaggacctggacgagccccgagccatcgcactgcaccccgtgatgggcctcatgtactggacagactggggagagaaccctaaaatcgagtgtgccaacttggatgggcaggagcggcgtgtgctggtcaatgcctccctcgggtggcccaacggcctggccctggacctgcaggaggggaagctctactggggagacgccaagacagacaagatcgaggtgatcaatgttgatgggacgaagaggcggaccctcctggaggacaagctcccgcacattttcgggttcacgctgctgggggacttcatctactggactgactggcagcgccgcagcatcgagcgggtgcacaaggtcaaggccagccgggacgtcatcattgaccagctgcccgacctgatggggctcaaagctgtgaatgtggccaaggtcgtcggaaccaacccgtgtgcggacaggaacggggggtgcagccacctgtgcttcttcacaccccacgcaacccggtgtggctgccccatcggcctggagctgctgagtgacatgaagacctgcatcgtgcctgaggccttcttggtcttcaccagcagagccgccatccacaggatctccctcgagaccaataacaacgacgtggccatcccgctcacgggcgtcaaggaggcctcagccctggactttgatgtgtccaacaaccacatctactggacagacgtcagcctgaagaccatcagccgcgccttcatgaacgggagctcggtggagcacgtggtggagtttggccttgactaccccgagggcatggccgttgactggatgggcaagaacctctactgggccgacactgggaccaacagaatcgaagtggcgcggctggacgggcagttccggcaagtcctcgtgtggagggacttggacaacccgaggtcgctggccctggatcccaccaagggctacatctactggaccgagtggggcggcaagccgaggatcgtgcgggccttcatggacgggaccaactgcatgacgctggtggacaaggtgggccgggccaacgacctcaccattgactacgctgaccagcgcctctactggaccgacctggacaccaacatgatcgagtcgtccaacatgctgggtcaggagcgggtcgtgattgccgacgatctcccgcacccgttcggtctgacgcagtacagcgattatatctactggacagactggaatctgcacagcattgagcgggccgacaagactagcggccggaaccgcaccctcatccagggccacctggacttcgtgatggacatcctggtgttccactcctcccgccaggatggcctcaatgactgtatgcacaacaacgggcagtgtgggcagctgtgccttgccatccccggcggccaccgctgcggctgcgcctcacactacaccctggaccccagcagccgcaactgcagcccgcccaccaccttcttgctgttcagccagaaatctgccatcagtcggatgatcccggacgaccagcacagcccggatctcatcctgcccctgcatggactgaggaacgtcaaagccatcgactatgacccactggacaagttcatctactgggtggatgggcgccagaacatcaagcgagccaaggacgacgggacccagccctttgttttgacctctctgagccaaggccaaaacccagacaggcagccccacgacctcagcatcgacatctacagccggacactgttctggacgtgcgaggccaccaataccatcaacgtccacaggctgagcggggaagccatgggggtggtgctgcgtggggaccgcgacaagcccagggccatcgtcgtcaacgcggagcgagggtacctgtacttcaccaacatgcaggaccgggcagccaagatcgaacgcgcagccctggacggcaccgagcgcgaggtcctcttcaccaccggcctcatccgccctgtggccctggtggtggacaacacactgggcaagctgttctgggtggacgcggacctgaagcgcattgagagctgtgacctgtcaggggccaaccgcctgaccctggaggacgccaacatcgtgcagcctctgggcctgaccatccttggcaagcatctctactggatcgaccgccagcagcagatgatcgagcgtgtggagaagaccaccggggacaagcggactcgcatccagggccgtgtcgcccacctcactggcatccatgcagtggaggaagtcagcctggaggagttctcagcccacccatgtgcccgtgacaatggtggctgctcccacatctgtattgccaagggtgatgggacaccacggtgctcatgcccagtccacctcgtgctcctgcagaacctgctgacctgtggagagccgcccacctgctccccggaccagtttgcatgtgccacaggggagatcgactgtatccccggggcctggcgctgtgacggctttcccgagtgcgatgaccagagcgacgaggagggctgccccgtgtgctccgccgcccagttcccctgcgcgcggggtcagtgtgtggacctgcgcctgcgctgcgacggcgaggcagactgtcaggaccgctcagacgaggtggactgtgacgccatctgcctgcccaaccagttccggtgtgcgagcggccagtgtgtcctcatcaaacagcagtgcgactccttccccgactgtatcgacggctccgacgagctcatgtgtgaaatcaccaagccgccctcagacgacagcccggcccacagcagtgccatcgggcccgtcattggcatcatcctctctctcttcgtcatgggtggtgtctattttgtgtgccagcgcgtggtgtgccagcgctatgcgggggccaacgggcccttcccgcacgagtatgtcagcgggaccccgcacgtgcccctcaatttcatagccccgggcggttcccagcatggccccttcacaggcatcgcatgcggaaagtccatgatgagctccgtgagcctgatggggggccggggcggggtgcccctctacgaccggaaccacgtcacaggggcctcgtccagcagctcgtccagcacgaaggccacgctgtacccgccgatcctgaacccgccgccctccccggccacggacccctccctgtacaacatggacatgttctactcttcaaacattccggccactgcgagaccgtacaggccctacatcattcgaggaatggcgcccccgacgacgccctgcagcaccgacgtgtgtgacagcgactacagcgccagccgctggaaggccagcaagtactacctggatttgaactcggactcagacccctatccacccccacccacgccccacagccagtacctgtcggcggaggacagctgcccgccctcgcccgccaccgagaggagctacttccatctcttcccgccccctccgtccccctgcacggactcatcctgacctcggccgggccactctggcttctctgtgcccctgtaaatagttttaaatatgaacaaagaaaaaaatatattttatgatttaaaaaataaatataattgggattttaaaaacatgagaaatgtgaactgtgatggggtgggcagggctgggagaactttgtacagtggagaaatatttataaacttaattttgtaaaaca

SEQ ID NO: 2 - DNA, 5120 bp, Homo sapiens
actaaagcgccgccgccgcgccatggagcccgagtgagcgcggcgcgggcccgtccggccgccggacaacatggaggcagcgccgcccgggccgccgtggccgctgctgctgctgctgctgctgctgctggcgctgtgcggctgcccggcccccgccgcggcctcgccgctcctgctatttgccaaccgccgggacgtacggctggtggacgccggcggagtcaagctggagtccaccatcgtggtcagcggcctggaggatgcggccgcagtggacttccagttttccaagggagccgtgtactggacagacgtgagcgaggaggccatcaagcagacctacctgaaccagacgggggccgccgtgcagaacgtggtcatctccggcctggtctctcccgacggcctcgcctgcgactgggtgggcaagaagctgtactggacggactcagagaccaaccgcatcgaggtggccaacctcaatggcacatcccggaaggtgctcttctggcaggaccttgaccagccgagggccatcgccttggaccccgctcacgggtacatgtactggacagactgggttgagacgccccggattgagcgggcagggatggatggcagcacccggaagatcattgtggactcggacatttactggcccaatggactgaccatcgacctggaggagcagaagctctactgggctgacgccaagctcagcttcatccaccgtgccaacctggacggctcgttccggcagaaggtggtggagggcagcctgacgcaccccttcgccctgacgctctccggggacactctgtactggacagactggcagacccgctccatccatgcctgcaacaagcgcactggggggaagaggaaggagatcctgagtgccctctactcacccatggacatccaggtgctgagccaggagcggcagcctttcttccacactcgctgtgaggaggacaatggcggctgctcccacctgtgcctgctgtccccaagcgagcctttctacacatgcgcctgccccacgggtgtgcagctgcaggacaacggcaggacgtgtaaggcaggagccgaggaggtgctgctgctggcccggcggacggacctacggaggatctcgctggacacgccggacttcaccgacatcgtgctgcaggtggacgacatccggcacgccattgccatcgactacgacccgctagagggctatgtctactggacagatgacgaggtgcgggccatccgcagggcgtacctggacgggtctggggcgcagacgctggtcaacaccgagatcaacgaccccgatggcatcgcggtcgactgggtggcccgaaacctctactggaccgacacgggcacggaccgcatcgaggtgacgcgcctcaacggcacctcccgcaagatcctggtgtcggaggacctggacgagccccgagccatcgcactgcaccccgtgatgggcctcatgtactggacagactggggagagaaccctaaaatcgagtgtgccaacttggatgggcaggagcggcgtgtgctggtcaatgcctccctcgggtggcccaacggcctggccctggacctgcaggaggggaagctctactggggagacgccaagacagacaagatcgaggtgatcaatgttgatgggacgaagaggcggaccctcctggaggacaagctcccgcacattttcgggttcacgctgctgggggacttcatctactggactgactggcagcgccgcagcatcgagcgggtgcacaaggtcaaggccagccgggacgtcatcattgaccagctgcccgacctgatggggctcaaagctgtgaatgtggccaaggtcgtcggaaccaacccgtgtgcggacaggaacggggggtgcagccacctgtgcttcttcacaccccacgcaacccggtgtggctgccccatcggcctggagctgctgagtgacatgaagacctgcatcgtgcctgaggccttcttggtcttcaccagcagagccgccatccacaggatctccctcgagaccaataacaacgacgtggccatcccgctcacgggcgtcaaggaggcctcagccctggactttgatgtgtccaacaaccacatctactggacagacgtcagcctgaagaccatcagccgcgccttcatgaacgggagctcggtggagcacgtggtggagtttggccttgactaccccgagggcatggccgttgactggatgggcaagaacctctactgggccgacactgggaccaacagaatcgaagtggcgcggctggacgggcagttccggcaagtcctcgtgtggagggacttggacaacccgaggtcgctggccctggatcccaccaagggctacatctactggaccgagtggggcggcaagccgaggatcgtgcgggccttcatggacgggaccaactgcatgacgctggtggacaaggtgggccgggccaacgacctcaccattgactacgctgaccagcgcctctactggaccgacctggacaccaacatgatcgagtcgtccaacatgctgggtcaggagcgggtcgtgattgccgacgatctcccgcacccgttcggtctgacgcagtacagcgattatatctactggacagactggaatctgcacagcattgagcgggccgacaagactagcggccggaaccgcaccctcatccagggccacctggacttcgtgatggacatcctggtgttccactcctcccgccaggatggcctcaatgactgtatgcacaacaacgggcagtgtgggcagctgtgccttgccatccccggcggccaccgctgcggctgcgcctcacactacaccctggaccccagcagccgcaactgcagcccgcccaccaccttcttgctgttcagccagaaatctgccatcagtcggatgatcccggacgaccagcacagcccggatctcatcctgcccctgcatggactgaggaacgtcaaagccatcgactatgacccactggacaagttcatctactgggtggatgggcgccagaacatcaagcgagccaaggacgacgggacccagccctttgttttgacctctctgagccaaggccaaaacccagacaggcagccccacgacctcagcatcgacatctacagccggacactgttctggacgtgcgaggccaccaataccatcaacgtccacaggctgagcggggaagccatgggggtggtgctgcgtggggaccgcgacaagcccagggccatcgtcgtcaacgcggagcgagggtacctgtacttcaccaacatgcaggaccgggcagccaagatcgaacgcgcagccctggacggcaccgagcgcgaggtcctcttcaccaccggcctcatccgccctgtggccctggtggtggacaacacactgggcaagctgttctgggtggacgcggacctgaagcgcattgagagctgtgacctgtcaggggccaaccgcctgaccctggaggacgccaacatcgtgcagcctctgggcctgaccatccttggcaagcatctctactggatcgaccgccagcagcagatgatcgagcgtgtggagaagaccaccggggacaagcggactcgcatccagggccgtgtcgcccacctcactggcatccatgcagtggaggaagtcagcctggaggagttctcagcccacccatgtgcccgtgacaatggtggctgctcccacatctgtattgccaagggtgatgggacaccacggtgctcatgcccagtccacctcgtgctcctgcagaacctgctgacctgtggagagccgcccacctgctccccggaccagtttgcatgtgccacaggggagatcgactgtatccccggggcctggcgctgtgacggctttcccgagtgcgatgaccagagcgacgaggagggctgccccgtgtgctccgccgcccagttcccctgcgcgcggggtcagtgtgtggacctgcgcctgcgctgcgacggcgaggcagactgtcaggaccgctcagacgaggtggactgtgacgccatctgcctgcccaaccagttccggtgtgcgagcggccagtgtgtcctcatcaaacagcagtgcgactccttccccgactgtatcgacggctccgacgagctcatgtgtgaaatcaccaagccgccctcagacgacagcccggcccacagcagtgccatcgggcccgtcattggcatcatcctctctctcttcgtcatgggtggtgtctattttgtgtgccagcgcgtggtgtgccagcgctatgcgggggccaacgggcccttcccgcacgagtatgtcagcgggaccccgcacgtgcccctcaatttcatagccccgggcggttcccagcatggccccttcacaggcatcgcatgcggaaagtccatgatgagctccgtgagcctgatggggggccggggcggggtgcccctctacgaccggaaccacgtcacaggggcctcgtccagcagctcgtccagcacgaaggccacgctgtacccgccgatcctgaacccgccgccctccccggccacggacccctccctgtacaacatggacatgttctactcttcaaacattccggccactgcgagaccgtacaggccctacatcattcgaggaatggcgcccccgacgacgccctgcagcaccgacgtgtgtgacagcgactacagcgccagccgctggaaggccagcaagtactacctggatttgaactcggactcagacccctatccacccccacccacgccccacagccagtacctgtcggcggaggacagctgcccgccctcgcccgccaccgagaggagctacttccatctcttcccgccccctccgtccccctgcacggactcatcctgacctcggccgggccactctggcttctctgtgcccctgtaaatagttttaaatatgaacaaagaaaaaaatatattttatgatttaaaaaataaatataattgggattttaaaaacatgagaaatgtgaactgtgatggggtgggcagggctgggagaactttgtacagtggagaaatatttataaacttaattttgtaaaaca

SEQ ID NO: 3 - protein, 1615 aa, Homo sapiens
MEAAPPGPPWPLLLLLLLLLALCGCPAPAAASPLLLFANRRDVRLVDAGGVKLESTIVVSGLEDAAAVDFQFSKGAVYWTDVSEEAIKQTYLNQTGAAVQNVVISGLVSPDGLACDWVGKKLYWTDSETNRIEVANLNGTSRKVLFWQDLDQPKAIALDPAHGYMYWTDWGETPRIERAGMDGSTRKIIVDSDIYWPNGLTIDLEEQKLYWADAKLSFIHRANLDGSFRQKVVEGSLTHPFALTLSGDTLYWTDWQTRSIHACNKRTGGKRKEILSALYSPMDIQVLSQERQPFFHTRCEEDNGGWSHLCLLSPSEPFYTCACPTGVQMQDNGRTCKAGAEEVLLLARRTDLRRISLDTPDFTDIVLQVDDIRHAIAIDYDPLEGYVYWTDDEVRAIRRAYLDGSGAQTLVNTEINDPDGIAVDWVARNLYWTDTGTDRIEVTRLNGTSRKILVSEDLDEPRAIALHPVMGLMYWTDWGENPKIECANLDGQERRVLVNASLGWPNGLALDLQEGKLYWGDAKTDKIEVINVDGTKRRTLLEDKLPHIFGFTLLGDFIYWTDWQRRSIERVHKVKASRDVIIDQLPDLMGLKAVNVAKVVGTNPCADRNGGCSHLCFFTPHATRCGCPIGLELLSDMKTCIVPEAFLVFTSRAAIHRISLETNNNDVAIPLTGVKEASALDFDVSNNHIYWTDVSLKNISRAFMNGSSVEHVVEFGLDYPEGMAVDWMGKNLYWADTGTNRIEVARLDGQFRQVLVWRDLDNPRSLALDPTKGYIYWTEWGGKPRIVRAFMDGTNCMTLVDKVGRANDLTIDYADQRLYWTDLDTNMIESSNMLGQERVVIADDLPHPFGLTQYSDYIYWTDWNLHSIERADKTSGRNRTLIQGHLDFVMDILVFHSSRQDGLNDCMHNNGQCGQLCLAIPGGHRCGCASHYTLDPSSRNCSPPTTFLLFSQKSAISRMIPDDQHSPDLILPLHGLRNVKAIDYDPLDKFIYWVDGRQNIKRAKDDGTQPFVLTSLSQGQNPDRQPHDLSIDIYSRTLFWTCEATNTINVHRLSGEAMGVVLRGDRDKPRAIVVNAERGYLYFTNMQDRAAKIERAALDGTEREVLFTTGLIRPVALVVDNTLGKLFWVDADLKRIESCDLSGANRLTLEDANIVQPLGLTILGKHLYWIDRQQQMIERVEKTTGDKRTRIQGRVAHLTGIHAVEEVSLEEFSAHPCARDNGGCSHICIAKGDGTPRCSCPVHLVLLQNLLTCGEPPTCSPDQFACATGEIDCIPGAWRCDGFPECDDQSDEEGCPVCSAAQFPCARGQCVDLRLRCDGEADCQDRSDEVDCDAICLPNQFRCASGQCVLIKQQCDSFPDCIDGSDELMCEITKPPSDDSPAHSSAIGPVIGIILSLFVMGGVYFVCQRVVCQRYAGANGPFPHEYVSGTPHVPLNFIAPGGSQHGPFTGIACGKSMMSSVSLMGGRGGVPLYDRNHVTGASSSSSSSTKATLYPPILNPPPSPATDPSLYNMDMFYSSNIPATARPYRPYIIRGMAPPTTPCSTDVCDSDYSASRWKASKYYLDLNSDSDPYPPPPTPHSQYLSAEDSCPPSPATERSYFHLFPPPPSPCTDSS

SEQ ID NO: 4 - protein, 1615 aa, Homo sapiens
MEAAPPGPPWPLLLLLLLLLALCGCPAPAAASPLLLFANRRDVRLVDAGGVKLESTIVVSGLEDAAAVDFQFSKGAVYWTDVSEEAIKQTYLNQTGAAVQNVVISGLVSPDGLACDWVGKKLYWTDSETNRIEVANLNGTSRKVLFWQDLDQPKAIALDPAHGYMYWTDWVETPRIERAGMDGSTRKIIVDSDIYWPNGLTIDLEEQKLYWADAKLSFIHRANLDGSFRQKVVEGSLTHPFALTLSGDTLYWTDWQTRSIHACNKRTGGKRKEILSALYSPMDIQVLSQERQPFFHTRCEEDNGGWSHLCLLSPSEPFYTCACPTGVQMQDNGRTCKAGAEEVLLLARRTDLRRISLDTPDFTDIVLQVDDIRHAIAIDYDPLEGYVYWTDDEVRAIRRAYLDGSGAQTLVNTEINDPDGIAVDWVARNLYWTDTGTDRIEVTRLNGTSRKILVSEDLDEPRAIALHPVMGLMYWTDWGENPKIECANLDGQERRVLVNASLGWPNGLALDLQEGKLYWGDAKTDKIEVINVDGTKRRTLLEDKLPHIFGFTLLGDFIYWTDWQRRSIERVHKVKASRDVIIDQLPDLMGLKAVNVAKVVGTNPCADRNGGCSHLCFFTPHATRCGCPIGLELLSDMKTCIVPEAFLVFTSRAAIHRISLETNNNDVAIPLTGVKEASALDFDVSNNHIYWTDVSLKNISRAFMNGSSVEHVVEFGLDYPEGMAVDWMGKNLYWADTGTNRIEVARLDGQFRQVLVWRDLDNPRSLALDPTKGYIYWTEWGGKPRIVRAFMDGTNCMTLVDKVGRANDLTIDYADQRLYWTDLDTNMIESSNMLGQERVVIADDLPHPFGLTQYSDYIYWTDWNLHSIERADKTSGRNRTLIQGHLDFVMDILVFHSSRQDGLNDCMHNNGQCGQLCLAIPGGHRCGCASHYTLDPSSRNCSPPTTFLLFSQKSAISRMIPDDQHSPDLILPLHGLRNVKAIDYDPLDKFIYWVDGRQNIKRAKDDGTQPFVLTSLSQGQNPDRQPHDLSIDIYSRTLFWTCEATNTINVHRLSGEAMGVVLRGDRDKPRAIVVNAERGYLYFTNMQDRAAKIERAALDGTEREVLFTTGLIRPVALVVDNTLGKLFWVDADLKRIESCDLSGANRLTLEDANIVQPLGLTILGKHLYWIDRQQQMIERVEKTTGDKRTRIQGRVAHLTGIHAVEEVSLEEFSAHPCARDNGGCSHICIAKGDGTPRCSCPVHLVLLQNLLTCGEPPTCSPDQFACATGEIDCIPGAWRCDGFPECDDQSDEEGCPVCSAAQFPCARGQCVDLRLRCDGEADCQDRSDEVDCDAICLPNQFRCASGQCVLIKQQCDSFPDCIDGSDELMCEITKPPSDDSPAHSSAIGPVIGIILSLFVMGGVYFVCQRVVCQRYAGANGPFPHEYVSGTPHVPLNFIAPGGSQHGPFTGIACGKSMMSSVSLMGGRGGVPLYDRNHVTGASSSSSSSTKATLYPPILNPPPSPATDPSLYNMDMFYSSNIPATARPYRPYIIRGMAPPTTPCSTDVCDSDYSASRWKASKYYLDLNSDSDPYPPPPTPHSQYLSAEDSCPPSPATERSYFHLFPPPPSPCTDSS

SEQ ID NO: 5 - DNA, 3096 bp, Homo sapiens
catcttctcacacgatctctcgcttcgcactccttcctttgattggttttcaccatttactcagacgacggtccttcttcgatctttgcacattcttctatcatctactaccttcatacccagctccgtcccctaatattcatgcgcggatggcccattccgtggtgaaaattcccttctactctgctaatctgctgttctctctccctcccgtcgggttctgctcctgccacgttctcccctctccccaccaaaggctgggttttctttgtcagggctcctttcccctttggaagaaggggggctgtatggccttggtgcgaggccctccagtgacaggatcccccatcacccagagttccacaggccctggtagggaggagggggagcagaagaggaggtgccatctttgcctgctggggaagggcaggggccacccacacagagctctcccatttgctgtggaccctggggccactgcccagttccttccaaaggaaagccagctccccaggtggtgggagagtgatatggcttcctcttaaacttagggaattgagtgtgtggttgcttctaagtgccttagaagccgggagcggctcctggaaagagcctgcctgccacagcgggccttaccctggctgtgcccacagatgtccctggggcctgccgctcctgcccggctctcctggcctcccccggtgtgggttgggaaaagcacagcaaattaaaaaacacctccatctctggcctttgaagaatgcatctgaacagccgagagtgtaaaccgtggtgaaatgtggtctttccagtttggggagaagcagggcagagctggggcttttgtacccagggtttccaagagctcctgcctccctcggctgggctggccagggccccccgctgggacctccagctgtaatagggaaggttttactgggttgctggccactgtggactgcccctaagggcaggtatgcctgcctttacccgggttcccctcctgcctggaagatacagcccatgggaggcctgttgtctgtgggatcctccagcatcagagacactggggccagcgtctgcctggtgaggtgcaggcctggcaggcccggtcccccacctgcttgagcacccacggtggtgggggctcgctgcctcccgagacaatctatgtcattgttgtccaaggaagctaatttagagtagaaagttccgtgtccagtcccactctgtgcgtgtgttagcaggggactctcgggccggagctgggtccaccctggtagggggacttcatggggcctgggcgacagcactgtgtatttgtgtgtgtgtgtgtttgtgtgtgtgtgtgtctgaggaggtggaccagtttctcaaaaggcctgtgaccccaagaaccaaggaatttcagcctgggtggatcacaccttcactggtgagtgggacaagctgggggccctcgccacaggagcagccagggcatggggcacagttggcctcattcacaaaatgggagtataagtgatccctgctctggcggccaggacgatgagtgggaacacaccgtgtgggggctgcctggcctgggtgtgccgcgggtgtccttgttggtgatggttccacctgcttgtgccaccagtgccctctgggtctcacacacaactctcttcccagcgaaggcccctcctgccctcaggcctcagtgctgcttccgtctcggaaggccccaggagctcctgcatcctgggcgtgattcctgtgtgcctgcagaccccctcgcggctgccatctcatcctttggtgcacctgttggccagacctcctggtagcgggtgctgcactcccctgaatgtgccggggcctgggggcagggacctgggctcctccctcactgagtggagggaactcagtgtcttggagttggggtgcctgcaggctgggtggtgcaggtgaaatgcagacctctcagctggtgttccagagcagctgccttcccccgcccgagggacttcacccgcagcccagtcaggggtggcgcctgggtgcatcgcccgcaggctgggtaggggtggagcctgggtggccctgcctgtgagctgcatagttgtcgcctttgaccctgagttttcttcgttatctgtttggacctgtttggggcaggcaggggatgagatctgaagataaatgccttagctgtgaccatctccttttgtgagaggtcaatgtccagttccgctgcagttataacatcccattttttgatttctttttattttttcctttttctttttgagatggagtctcgctctgtcacccaggctggagtgcaatggggtgacctcagctcactgcaacctccacttctcgggttcaagtgattctcctgcctcagcctcctgactagcaggggttacaggcgtgagccaccacgcccagctaatttttgtatttttagtagaggcaaggtttcgtcatgttggccaggctggtctcaaactcctggccttaagtgatctgcccgcctcggcctcccaaagtgctgagatgacaggtgtgagccaccgtgcccggcccagaactctttaattcccacctgaaacttgccgccttaagcaggtccccagtctccctcccctagtccctggtcccaccattctgctttctgtctcaatgaatttgcctaccgtaagtacctcatataaattgaatcataaagtatttgtctttttatatctggcttatttcacttagcataacattcttaagtttcatccatgttgtagcatgtgtcagaatctctctctttttttttttttttttttttttttttttttgcagacagagtctcgctctgtcatctagactggagttcagtggcacgatctcggttcactgcaacatctgcctcctgggtccaagcaattctcctgcctcagcctccttagcagctggaactacaggcgcgtgccaccatgccttgctaatttttgtatttttatgtggaggcagggtttcaccatcttggccaggctggtctcgaattcctggtcttcaccacgggggcccgaaggacccgggcaaagcgtggaggggagg

SEQ ID NO: 6 - DNA, 26928 bp, Homo sapiens
  misc_feature (12044),(12489),(26433),(26434),(26435),(26436),(26439),(26441): n = A,T,C or G
gaagaccaagggcacacagcgaggcagtttcagggcgggcagcctggggccccacggggcggccccggacacttgttctcacctgtggagggcagagaagggaacagggagagaagtggccggctgggagtggaggtgggtttgaggttttactgtaaactaaatgtgtaccctctaccttagttatgaattatgagacacgaagactgcgaaacagacacactcctctaaaagtgcctctaggctgacagggagaaagtcccgccaggctcccagacgccacctttgagtccttcaacaagcccgccagggcctcttgcccaccggtgtcagctcagccactgaaccctccaggaagaagacgtgctggtaggagaagaatctcacccaggcacagcctggaaggggcacagaaggggctccggaaccagcaagcccaagttggaactcccagtctgctactttctagaacgactgtgcccttggcgggtctaagtagaacctctccgcgcactctttcctcctttgtaaagtggggacagcaatggccaccttgcaggttcagagagggcttgcagtacctcacagaactgagtgcccgtgaacgtgtgtgttcctccagatttgtgacagctttgccaggctggagtcaggctgaacgcctctgccctcatggggtttatattctaggaagaccaacaaaaacaagaagacggaaaattaaaacaacaaaagccccattgacaggccgtgaagaatgccatgaaaaatgaatggcgttgtgctgcagtctttggggaaacgggcttacggaaagaaggacacttgagctgctaccaatgagcagccgtccggtgggagggcagttcaggaagagcagacatccactgaggaggcgctggggcagagggcagcctggtcgctggattcgggggaggaaccacatcaggccatgagctggagctggtggtagaatgtacaggagaggccagccagggccagctcatgtcagacctcaagcggggaagatgaatcgagaatgcaccccacgagcaatgggaagccagtctacgatttaagcagcaaaaatattttcccttcttccaccctgcatccagctctaccagcacagcctggggttctattttcaagatagaatagacccagactcccagctcttcttacacttctactactgccacctgtcacccactcatgcgtccccacttgcagcctcgacccccttccacctgatctcatggcagccagggaagctccagggctcgtgagggctgccatctcaggaaagaagcaaaagccttcggcacctgcagggcctgctccaaccacacttcttccttgacctctcagcttccttagccactcccttcccacatctcaccctgctccagccacagtggtgtctctgtgggttctcaaacacaccaggtgcactcctgcctcagggcctttgtgcttgctgttctctgctgggactcttttttttttttttttttttgagacagggtctcactctgtggcccaggctggagtgtagtggtgtgatcgtagctcattgcaacctcaaactcctgggctcaagcaatcctcccacctcagcctctcaagtagttagcttttgttgttttgttttgagatgggatctcactctgttgcccaggctggagtgcagtggggcaatcttggctcaccacaacctctgcctcccaggctcaagcaattctcctgcctcagcctcccaagtagctgggattacaggcatgtgccaccacgcccagcttatttttgtatttttagtagagacagggtttcaccatgttggtctggctggtcttgaactcctggcctcagatgatccacctgcctcggcctcccaaagtgctgggatgacaggcatgagcctgtctctagtagttaggactacagagaggggccatcatgcctggtgatcctcccaccttttctgctccaactctttcaccccacttagcctcgtggctcactctcttacctcttcagctcctcagtcaggcctgaggacccctgttgaaaattgcaaaccacaccccccaccaccaccacccactattgccagcactttctactccatttctctgctttacttttctcctttgtactcatcaccacctgactcattacatgtttacgtatctttcttctctccactagcatggaagctccaggagagcagagagtgtagttttattccctgatgtgtttcctgtgcccgtaccagggcctagcacacagtaggtgctcagtaaatgtgtgttggatgaacaaatacagtgaaaggatctgatctacatttataaagaaggcactctggctgctgagtggggatgagactgtcaggaggaaagaggcccctgtgggggcctggccagcaggtgggtacaatggtagcagccaggagagagggcctcttggactcaagtggatggggcctgctcagggctccggccacaggaacaaagggaagggggcccaggatggcctgtcatagaggacacattacaactggcccaaagttcaagtcaggtttctaaatttgggaagggatacagaaaaactaaagactctactggacagtcagttattgaaatgattacatagaaaatgtaccaagaattaaaaaaaaaaaaaaaaagcattatgaaggggccaccagagactcccagagaggaaagggactatgggctggatgcggtgactcacacctataatcccagcactttgggaggccgaggagggtggatcacgaggtcaggagttcaaaaccagcctaggcaacatggtaaaacccccgtttctactaaaaatacaaaaaattagctgggcatggcagcatgtgcctgtaatcccagctactcgggaggctgaggcaggagagttgctagaacccaggaggcagaggttgcagtgagccgagattgagccactatgctccagcttgggcgacagagcaagactccgtctctaaaaaaaagaaaaaaaaggccagatgaggtggctcatgcctgtaatcccagcactttgggaggccgaggtgggtggatcacgaggtcaggagatcgagaccatcctggctaacatggtgaaactccatctctacttaaaatacaaaaaattagccgggcgtggtggcgggcacctgtagtcccagctacttgggaggctgaggcaggagaatggcgtgaacctgggaggcggagcttgcagtgagccgagattgcgccactgcactccatccagcctgggcgacagagttagactccgtctcaaaaaaaaaaaaaaaaaaaaaattagctgattagttgggcttggtggcgggcgcctgtaatcccaactactcgggaggctgaggcgggagaatcacttgaacccgggaggcagaggttgcaatgagccgatatcacgccactacactccagcctgggcgacagagcaagactccatctcaaaaaagaaaaaaaaaaagaaaggggctgtgctgtggcctgggacccaaagcacactactgcaaggtcccagggtgcctgactccaaccggagccttgagaacattcatttgcaaagaatgaattaaaattcagcactattttattctgcaggattccagcaccccaaggacagtcatttttagacccttcagtaacgtaataagtaaccggaggatgtgctgagcttccacttccccagacggttgcctgtcacagctcatcaggccaacaaacttttcttaggcctcaaatttggaaatgttcactctcagttcgttccttagatgcaagtccatcccaatgaagtaacaggggctcagcacctgtccaatctcattgcttccggggacaggggcccatgaggatgtcgtttcagcccggtgacacttgggcaaagtgccttttggtttccctcccaggctggaacgtgctggctctgtgaagttacgctgggcacaagagccccccccaacccggcaggactgactgctgtggtcagaggcgcccctggggctttgggagccacagaatcttcctgagggcagcgccggaggaggccccagtgagagtgcccactgccaggctcattcctcaggctgccgcaggcctctccccaaaacaggcaatgcttctcagcaacctgccccaggagcaggccagggaaggccgccatcggcctacagtgctgggctctggagggcttggttggtaacaggccatggtttctatgagccagctggggtgtgaaggacacaggctggattcacctctctgggcctcagtttctgcattcaaaaagtgggaatcatgatatctgctctatttcttatctctcagtgctgatgtgaacctccaataagacttttaaaaatactctttctaccttacttttatttttcatttattttaagataatgtctagctgtctcacccaggctggagtgcagtggtgtgattacggctcactacagccttaacctcccaggctcaagtgatcctcctaccacagcctcccaagtagctggaactacaggcatgcaccaccgcacctggataattttttcttttgagacaaggtttcactctgttgcccaggctggagtgcagtggtgcactcttggctcactgcagcctcaacctccctgggcttaggtgatcctcacacttcagtctcccaagtagctgggactacaggtatgtgccagtacacccagctaatatttttgaaggatggggtttcactatattgcccaggctggtcttgaactccagggtttaagcaatctaccttcctcagcctgccaaagtgctaggattataggtatgagccaccccccggcctataatcctaccactttaaaaaagcctgtaattttagcactttaaaaaatttttctaaattttttatagagatgggggacagctgtggtctcactgtgttgcccaggctggtcttgaactcctaggatcaagccatcctcctggcctggcctcccaaagtgttgggattataagcataagccttaccttaccttttttttttgagttgcagttttgttcttgttgctcaggctggagtgcaatggcaagatcttggctcactgcaacctccacctcccgggttcaagcaattctcctgcctcagcctcccgagtagctgggattacaggcatgcgccaccacacccagctaattttgtatttttagtagagatggggtttctctatataccttaattttaaagcactgcattcatgtaaattgtgattaacatggattcaagagagggagtgaggatgaatgagccaggcagtcacctcggctgtcaccctccacttctctcctccttctgacagtcatcgtccatccgtttctgcagctgtttgtttgactctcctgatcattttgcttgccacataacttgcctcctgggaaagaatgccctgggcaggcccacatgagtagtgaaaaataatctgcagtgaaaaataaaactaagtagtctggtccacagagcagtcttattttttcactgcagatgaaggagttgacattcaggcttcattctcatttataagtgttttaaagacacatacagtggattgaacagtggccttcaaaaagatgtatctacatcctaatccctgggacctgtgaatgttaaccaagttaggaaaagggtcttcccgggtgtcattaagttagagatcttgagatgaggagctcatcgtggattatccaggtggaccctgcatccaaggacaaatggtccttagaaaagaaaagcagaggctgggcacagtggctcaagcctgtaatcccagcactttgagaggccgaggtgggtggatcacctaaggtcatgagttcgagagcagcctggccaacatgatgaaatcccatctctactaaaaatacaaaaattagcaaggcatggtggcgggtgcctataatcccagctactcaggaagctgaggcaggagaatggcttgcacctgggaggcggaggttgcagtgagccaagatcgcgccactgcactccagcctgagggagaaaagtgaaactctgtctcataaaagaaaagaaaagcagacagagatctgagacagaagaggagagtgaaggaaaaaaggccatgtgaagatgaggcagaggttggagccatgcagccacaagccaaggaatacctggagccccagaagttgcaagaggtaggaagaagcctcccctagagcctccagacggagcacagccctgccaacacctccacctcagacttctggcctccagcactgtgagataatcaactgctgttgttttaagccaccagatttgtggtaatttgttatggcagccacaggaaactaatacagtacctaatcttcacaaacccatcttacagaaaaggaaactgaagtcagagaggtagtggcttgtgcagtgtgttaggccattcttgtattactataaagaaatacctgaggccgggcatggtggctcacgcctgtaatcccagcactttgggaggccaaggtgagtggatcacttgaggtcaggagttcaagaccagcctggacaacatggtgaaaccccatttctactgaaaatatgaaaattagccaggcatggtggcgtgcatctgtagtcccagctactcaggaggctgaggcaggagaatcacttgcgcccgggaggaggaggttgtagtgagccaagattgtgccactgcactccagcctgggagacaagagagaaaccctgtctcaaaataaataaaaaacaaataaacacctgagactgggtagtttataaagaaaggggttaactggctcccggttctgcaggctgtacaagcatggtgccggcatctgcttggttgctgggaaggcttcagggagttttactcatcgtggaaggcagagccagagcaggtgcatcacacagcaaaagcaggagcgagagagagagagagcagggaggtgtgcacacttttaaatgagcagatctcacgagaactcaccattgcaaggacagcaccaagccacgaggggtctgcccccatgacccaaacctcccactaggccccacccccaacattgggaattacagttcaacatgaggtttggggggacaaatatccaaactatatcattccacccctggccccccagatctcatgttcttctcacattgcaaaatatagtcatgccttcccagtagccccccaaagtcttaactcatcccagcattaactcaaaaatcccattcccaagtccaacgtctcatctgaagatgagttcctttcacctacaagactgtaaaaatgaaaacagttatttactgctgagatacaatgggggcataggcattaggtaaacattcctgttccaaaagggagaaatcggtcaaaagaaaggggctataggccccaagcaagtccaaaacccagcagagcaatcattcaatcttaaagctccaaaataacctccttaaactccatgtcccatagccagggcacactggtgcaaggggcaggctcccaaggccttgggcagctctattcctgcggctttgcagaattcagtccccatggctgctcttacagattggagatgagggcctgcggcttttccaggtgcagggtgcaagctgctggtgatctaccattctggggtgtggatggtggcggccccgtcccgcagctccactaggcattgtcccagtggggactctatgtggggcctccaaccccacatttcccctccaatgggaaggctctgcccctgcagcagccttcttcctgggctcccaggctttctcatacatcctctgacatctaggtggatggtgtcaagcttccttcactcttgcactctgcacacctacaggcttaacaccacatggaagctgccaaggtgtatggctggaaccctctgaagcagcagcctgagctgtgactatggccctttgagccaaggctggagctggaacagtctagatgcaggcagggagcagtgtcctgaggctgtgcagagcagcagggccctgtgcctggacaatgaaaccattctttcctcctcatcctctgggcctgtgatgggagggttgtggaagatctctgaaatgcctttgaggcctttttgcctctgaggcctatttcctattgtctcagttattggcagtcggctcctttttagttatgcaaatcctctagcaagaggttactccactgccggcttgaactcctctcctgaaaaagctttttctttctttgtcacatggccaggctgcaaattttccaaacttttatgctctgttttacctttaaatataacttctaactttaattcatttatttgctcctgcatttgagcatagggaattcaaagaagctgggccacatcttgaatgctttgctgcttcaaaatttatggccacgcttggtggctcacacctgtaatcccagcactttgggaggcctaggtgggcagatcacgagatcaggagatcgagaccatcctggtcaacatggtgaaacccatctctactaaaaatacaaaaaaattagcttggtgtggtggcgcagacctgtagtcccagctactggagaggctgaggcaggagaattacttgaacctgggaggcagaggttgcagtgagcccagatcatgccactgcactccagcctggtgacagaataagatttgatctcgaaaggaaggaaggaaggaggaagggaagaaatgtcttccccccagatgtcctgggtcatccctcttatgttcaaacttcaacagatccctagggcatgaaaataatacagccaaattatttgctaaggcataacgaaagtgacctttgctccagttcccaataagttcctcatttccatctgagactcatcaccctggccttggcttgtccatatcactgtcagcattttggtcacaatcatttaaccagctaatcgggaggctgaggcaagaggatcacttgaacccaggaggttgaggctgcagtgagctgtgatcacatcactgcagtccagcttgggcaacagagcaagatcctgtctcaataaataaataaataaatacataaataacttaagtttatttaaagctgcatctttgccaccatggagaaaggccaggccagctccttctctctttctgcacgtgttcctcccacctcagctgcctctgctcctcaaggaggaacagagggagtaggaaaggccatcccaggaggcccagcaccccatgacctggctctggggccttgtgggtttatggattcccagtgctgagtcatccctcacaggctcttgtgggcaccttggacattggtcagaagcatgtggtccccgggaacacaccttttcctgatcatctgggaagggcagcttgtgccagcgaggccacctgttcagcgccacggcccgccagacagctgcagccacagccttgcctttgatcagagcaaacaccagacatgtgtgtcatgcccccaacccatctccaggggacacatgtcctttcttgccaggcctgagatgaacaagagagggacaagtccccaagcctctctctccttcctgcctcacccactccgctgttagattctcaaggtggatggtgggctaactagggcaaccgaccatcctggtttacctagaactgagggggcattttcaggaataaaactgcaaaagtctggagcaaacaggagcaagttggtcactctggggctggtggagtcaggtttccttctgcaggccccctccccgcaagcatgggtggaacccaggacaggaacacagagcaggccccaggaccgggcttgtcacttacaagtcttttttttttttttttttttgagatggagtcttgctctgtcatcagggctggagtacagtggtgccatcttagctcactgcaacctctgccttctgggttcaagtgatccccctgcctcagcctcctgagtagctgggactacaggtggcaccaccacgcccagctaattttttgtatttctagtagagatgagatggccaggctggtcttgaactcctgacctcaagtgatctgcccgccttggcctcccaaagtgctgggattacaggtgtgagccactgtgcctggccccactcacaagtcttaaaccatgcctcagcacatcaatgccatttacaaaaaggtagagggattttccaggcaaaaatagatgaaagacataggatgattgatcatgtcctgcttaaacataggtctgatgctattaagaattgagggctgggagcggtggctcacgcctgtaatcccagcactttgggaggccgaggcgggcggatcacgaggtcaggagatcgagaccatcctggctaacacggtgaaaccccatctctactaaaaatacaaaaaatggccgcgcgcggtgactcacgcctgtaatcccagcactttgggaggccaaggcgggcggatcacgaggtcaggagatcgagaccatcctggctaacacagtgaagccccgtctctactaaaaaatacaaaaaaaattagccaggcatggtggcgggcgcctgtagtcccagcaacttgggaggctgaggcaggagaagaatggtgtgaacctgggaggtggagcttccagtgagccgagatcacaccactgcactccagcctgggcgacagagtgaaactccatctcaaaaaaaaaataaataaataaataagaattgttagtattttgcaggtgtgacaaatgattctgtttctgtggcagaatgttctcaggagatctcttttgaactctcatggaaagcatcatgctgttggcaacatcacatttatttttatttatttattattttttagagacagggtcttgctctgttgcccaggctggagtgcagtggcacaatcacagctcactgcagcctcaacctcctgggctcaagcaatcctcctgcctcagcctcccaaagtagctgggaccacaggcgtgagccactgcactcagcccaatgtaccttcaatatttacatttctggcaaaggtagcaaaaccttaacaaattttgaatctagataataaaattatgaggctgggtgcagtggccctgacagggatggctcacatctgtaatctcaacattttgggaggccaaggtaggcggatcacctgaggccaggagtttgagaccagcctggccaacatggtgtaaccctgtctctaacaaaaatacaaaaaaattagccagacgtggtggtgcacgtctgtcatcccagctactagggaggctgaggcaggagaattgcttgaacccgagaggcagaggttgtgatgagccgagatcgcgtcattgcactccagcctgggcaaaagcaagagcgaaactctctctccaaaaaataaaaaaaaaataaattaatgaattaattaaaataaaataaaataatggatagtcactgtaaagaaaaaataaatgtatatatcagccaacaagtgatggaatagagcaccccatctccctggctggacagatacatcccacaacacctggaaggcggctccatgtagaactttctggactgcttgaggtgctgtgctggagcacggtgacagaggagctggaccatggacctcccccggcccccaccaagggcgaggtccccctgtggtgggtctgagggaggcatccgtatggcctctgcggcttgggcagggaatttggggtccaagtacttggtgcaaagcctggaaagagggtttgggtgctgagggcatatcccctgggccacatgggggcagaagtggggccccctgaagcttggagtcctgggcaggggcatctattttgctgtctgaggccttcagtacttgaagcaaaatggaggcagaatgtcccaccttaatgcccctgattcctccaaaccaattccagagacagcaagggccagaacagggatggccctgcccagggtcatgcancgaggaagtggccaggctgggatctgaacccaggctaatcccctcccttgtcctcctccaggccctcacccctgcatagagccctccagctcactcatcctcggccagctccatctcctcagcttgtaaacccccccgggattttcctttcttaaaaaacaaaggcttggccaggcacggtggctcacgcctgtactttgggggtggctcccagcactttgggaggccaaggtgggcggatcatgaggtcaagagattgagaccattctggccagcatggtgaaaccctgtatttactaaaaaaaaaaaaattaactgggcatggtggctagctacttaggaggctgaggcaggagaatcgcttgaacctgggagaaagaggttgcagtgagccaagatcgcgccactccactttaacctggcaacagaacaagattccgtttcnaaaaacaaacaaacaaacaaataaacaaaaaaaggcggagcgcgatggctcgcgcctgcaatcccagcactttgggaggctgaggcgggcggatcacttgaggttaggagtttgagaccagcttggccaacatggtgaaaccccatttccactaaaagtacaaaaatcagccaggtgtggtggtgggtgcctgtaatcccagctactcaggaggctgaggcaggagaatcgcttgaacccatgacctggaggctacagtgagctgagattgcgccactgtactccagcttgggcaacaagatttgtttctctaaaaaaaaaaaaaaaaagactggcccttccccttcagctcttcctcagggtccctgagcactctacacccccgtctacactgagcactccaccctgctgtctacactgagcactccaccctgccatctacactgaggactccaccccactgtctacactggctgcctcccgccctcacctcctgctaaggccattccccgctgcatctgtcttctagattctgcagccttcagcacgctgggcccctcctttgtccccttgagccacctccagcctccccctgagctgctactcctctcccagcagcctccacccaagcccctccagtccccaagctgtcccttgcatccagcactgcccttccacgtgccccttccctccagcttcacagcagggtggggcctccaggccctgcccactgtgcccatccacaagttgtggtgggagctccgaggggaggcaggggtgtgcatggacttgggacgtccaagtctgggaccaggggcagctggttggtggagtgtggagggggatagggactttcaggtagagaggctgtaggggcaagatcgggacggcggatgtccctaaggagggctctgacctgggaaatattgtgcagcttcctctttgccattcctggagctcagacactggccggctctcaccccgcccttcctgcaggacacagctccatcccagtgagttcctagtgtagacatctccagcagcacggatgggaaaggaagtcatcaaaggtgcccaggaccggaggctttttctggaggtggcagaggagggtgtgggtctcagggctctggctgagggcaagcgtgggaggtcttaggtctgcaccagccccgtgaaggcccctcctgctccctggtggagtcctagagggaacagcagcccctaggctctagcaggagtgggtaggggcttttctggcttcctactgtgccagcaggatagctgggcctggcactgagcccaaagatcacatgccggggcattggcgcagtgaggaacagacccttgccaaagctggcaaagaagaccccatggggtgcagctggtgaagctgagagctcaatgtttgggggagcctggcaaaaggggtcctcccctccctctgcaggccaggatcgcaggttttccctacatgttggtaattctcaaacaatcccatggccactggagcaaagatcacagtgggcggcggcctcgggagcagtggacagggcacgcagtgcctttgatgccagagccctcgccccaaagtcaacaaactctgcagcggactttgcacccggactttgttttcaccatacaaggaaagggacagatcacaggccctctcgctgccctcgctgagccggaagctgcagcgtgagctctctcaagccccatttctaggttccccaggcgcacccctgagcccctactcgcctattaagttctcctaatagcccttcaaggtcttaatgtatgtccattagacagaggggaaaactgaggcgagggcaagtgacttgaccgaggttcctcggcgagcagggcgtggagctgagaacctcgttattactgctccccacacaaccctctggccgttcttggaagaaggctgagccccgggggggccagagtgacccaaacaccatgggccgcctgcggtaacacgtgcggccacgaaggggcagcagtttcccgcccggccgggctctctccggcgctcagtatccgtcccaggccaagaagaagaaactcggggaggagggcggagggggctgcgtgggagggcgtggaagatggacgtggccaggggagtggcagctgcacacagtggatgctgttaagatgaagggaaagaacgtgggctccgagatcactggacacggttccacctttcttcccgctcactgcatggccctgggcgggttgttgaacccttggaaacctgtttttccttttttcctttttttttgagacagggtcttgctctgtggcccagactggagtgccgtggcacgatcttggctcactgctgcctcccaggttcaagtgatcctcccagctcagcctcctgcgtagctgggaccccaggtatgtgtcaccacagccggctaatttttgtatttttttgtagagacgggatttcgccgtattgcccaggctggtctcaaactcctgagttcaccggatcttcctgcctcagcctcccaaagtgctgggattactggcatgagccaccgcacccagcagagacctcagttttctaacctgtgccagcaggaataatgatagctgcctagcttggctgtgctgggaattaagtaagatgaccgggtagcaaatatgaagtattactggacacagagggccccaggctgggttagcagcggtggtcagggctgctgcttcctggcctgagctcgaaggagggccctcattaccacctgggtgagtcctcgtccaagcctggcactgctgcgtgggaataacttctgccacccaagttggcagattgtgtgcaaagttaagtcctgactctgtggggtggacttcgaggcctcttcatcggacctgcttccggtgactgcattcgcacctcctcctgttcctggtttaacacagcccagctttcctcctgctgagccctccctgggcctgctgtcaccctcgtgccgctgtgcctcgcagtgccactccctgtaccctgaatactttgccctgcctctccacccagctgagagtcagggcccctgtgaggctctgcccagcccgtcctccgggtttctgcctctgctgagcacttccctgcatgattgcttctgagagtccccccagcctgtgagcttctcaggactgggacagcttctcaggaccgaggcttcctggtctgcttgcaattttacaggcgggcacattttcccttggccaacatcagagactggacatctgcagatctgtgctagccactgagcacccaggcaccccagcaggtagctctgtaaccaacccattctgtaaagctgaggctcagagaggtgaagcgcctggcctggggccacagcctgcgtcagctgcagagccaggagctgagatatgcacctgcggctctgctcacagggtcctgcacagactgctgctggagccacctatgtagagtcaagagagttcatgttaactccctctcacatccctcagccagggtgggggctgacgatagacactcagggatggcctaccctccccaacaacccccgtcaggtttgccggatctccttggaagaaaagttctgggcagaattccaccgttggcctggcctacactctccttagtggcttaggaccctcagcggtggataagttgtgggcagaagagatgcaatcaggattctcacccactcaccccttgccagccccaataagctcaataagctgggctcggtctgaggaagtgtccaggaaatgtgcaaatggcctgggacagccctgtgttcctttcagtaaggttgctgaaggtgaggctgaaagttggagaaacagaagccagtgcttatggttttaattaagataatggaatgtatgtatgtatgtatgtatgtatgtatgtatttatgtatttatctttagagatagagtctcactctgttgcccaggctggaatgcggtgacacaatcatagctccttgcagcctcgacttcctatgcccaaatgatcctcctacctcagcctcctgagtagctgggactacagacacacgccaactatgcctagctaatttttatttctattttttgtggagactgggttctcactttgttgcccaggctggtcttgaacccctagcttcaagcaatcctcctgcctcagcctcccaaagtggagggattacaggtgtgagccaccacacctggcctggaatttatttgtattctgcttataaaattaatacattcttattgcagaaaagtttgaaaataaaagaaaggacaaagaacaaaaagcgtatataatttcacagctcagatctcactgctattaacatttttatttactttcaggcttttttctttctaggtacatatgcagagattattttattttatttattttattttatattttattttatattttttatttcattattttattttattttattttattatttttagagacagggcctcactctgtcacccaggctggagtacaatggagtgatcatagctcactgcagcctcaaacacctgggctcaagcaatccccccactcagccttctgagtagttgggactaaagtgtgagtctggctaattttttttactttttgtattgacagaggtctcactatgttgcccaggctgatctcaaactcctgggttcaagcgatcctcccaccttggactcccaaagtgctgggattacaggcatgagccaccatgcctggcctaaaatgccactttttgtcatttactaaaatcccatggacactttgacatgtctgtattctatgctattgatctgactgttggcatctacatcattatggccatctatcatctatcataatccattttaacattaaaattgtgctgctgcttagatttttctggcctgtctcctatttgtattcttccagataaattttagaatcattttatcaaattccccttgcagaaaaagccctattggattttggttgaaaaatactgaatttttacattaacttaggaaagggctgggcacggtggctcacgcctgtaatccctacacttttcgaggccaaggcaggtggatcacttgaggttgggagtttgagaccagcctggccaacatggtgaaactcggtctttactaaaaatacaaaaattgccaggcgcattggctcacctgtaatcccagcactttgggaggccgaggtgggtggatcacgaggtcaggagatagagaccatcctggctaacacggtgcaaccccgtctctcctaaaaatacaaaaaattagccaggcgtggtggtgggcgcctgtggtctcagctacttaggaggctgaggcaggagaatggtgtgaacccaggaggcggagcttgcagtgagccaagatcgcgccactgcactccagcctgggcgacagagtgagactccatctcaaaaaaaaataataataataatacaaaaattagccgggggtcgtggcgtgcacctataatcccagttacttgggaggctgaggcaggagaatcgcttgaatccaggaggtggaggttgcaatgagcagagatcgtgccactgtactccagcctgggtgacagagtgacactctgtgaaaaaaaaaaaaaaattctgaaggattgagactcttagactcttaggtcttcctatccaagagcacaatatagcttttcatgtattcaagcctttttcaatgcatcaacagaattttacagtttttttcatgatatcctgctatttcttataaaatgtattcctagatattctgcatgttttccggttgtttgttaataaatatttttcatttgtcattatttcctaattggctgttatttgtatatatgacatctgttgaattttttgattactttgaaaatggccattcttttgtgtttttttttaactttctattttgagataattttgacttacagaagatttgcaaaaatagtacagagagttcctgtttcccccttatgttaacccagtttctccttatgttaacatcttacataactacagaacaattgtcaaatctaagaatcaacctgggcacaatgctattaactaaactgcagaagctgttcagatctcaccagttcttctactgctccccttttctcttccagtgttcaatccggaatcctacattatatttagttgtcatttctctttggtgtcttccaatctgtgacagttcctcagtctttctttgtctttcatgactttcatttttttatacttttgaaaaatactggccggttgttttgtagaacgccctcagtttgggtttgcctgaagttttttgtgattagatcgaggtcatgcattattggagagggtgccaccgcctcgatgtgcaagctcaatgcatcatatcagagggtttgtaatgtcagtttataccgccggagaccctaacctggagcatttcgtgaaggtgctgtctgccaggattctccactagaaagttactatttttccctttttaattactgaatgtctgaggggaaatactttgagactatgcaaatatcctgtttctgctttaacttcggctcactaagtttagcattcatctatggatctcgcttatagcaagtattactgtggagttctaatggtaattttctgtttctctcattccttcaacctttattaatatgcttcttcctcacttattcattttgtttcagttgtttataccaacatggatttgtggatattggttttattctttgggttgcaattgaatcctatcattattttgttagtcagttgttccatccgaccttggtcattaggagcccttgaaatttggctcccatgcctttttttttttttttgagaccgagtctcactctgtcacccaggtttgagtgcagtggcatgatcttggcttcctgcaacctccgcctcccaggttcaagcaattctcctgcctcagcctcctgagtagctggtattataggcgctccaccaccttgcccggctaattttttgtatttttagtagagatggggttttattatgttggccaggctggtctcaaactcctgacctcaggtgatctgcccgcctcggcctcccaaagtgctgggactacaggcgtgagccaccacacctggcctcctatgccattttaacatgcccgtcttttctttttctttcctactttctgtgactgtaagaagctccaggatacatttttgctgccctagacttagcctcaatcagttctcagaaaagctctggttctttttatgggatacttagaaaactagctctgtatggcctggcgcggtggctcacgcctgtaatcccagtactttgggaggccgaggtgggcagatcacagatcacgaagtcaggagatcaagaccatcctggctaacatggtgaaactctgtctctactaaacatacaaaaaattagtccaggcgcggtggcgggcgcctgtagtcccagctactcaggaggctgaggcaggagaacggcatgaacccgggaggcggagcttgcagtgagccgagatcggcagccactgcactccagcctgggccacagagcgagactccgtctcaaaaaaaaaaaaaggaaaaagaaaaaagaaaactagctctgtatgctagttttttttttaagacagggtctctcttgccccagctggagtgtagcagcacgatcacagctcactgtagcctcaaccttctgggctcaagcaatcctcctgcctcagtctcctaagtagctgggtctacaggcatgcaccaccgtacgtggcaatttttaaaaactgtttgtagagatggagtctccctatgttgcctggtctggaactcctggcctcaagtgatcctcctgcctcggcctcccaaagtgctgagattacaggcatgagccactgtacctggcctggccaaggtctgtctttttttaaaagaagttgttgtatagttgtttttttttttatttttttttctgagacggagtctcgctctgtcgcccaggctggagtgcagtggtgcgatctcggctcactgcaagctccgcctcccaggttcacgccattctcctgcctcagcctcccgagtagctgggcctacaggcgcccgctaccacgcccggctaattttttgcatttttagtagagacggggtttcaccgtgttagccaggatggtctcgatctcctgacctcgtgatccgcccgcctcggcctcccaaagtgctgggattacaggcgtgagccaccgcgcccggcctgttgtatagtttttatctcgagttttctagcgatttaatcatattggttacaaaaaaggatgattttactacctcctttccaatgtttctacatattttttcattttatctaactgcattttaaaataaacttttaattttagaatggtttcatatttacagaaaatgtgcaaagatagtacagagagttcctgtgtactccacacccggtttccttattattatcttaacgtgatacacaattaataaaccagtaacattattattcactgaagtccacactttctttttttttttttctgagacggagtctacttctgtcacccaggctggagtgcagtggcgcaatctcggctcactgcaacctccacctcctgggttcaggcaattctgtggctcagcatcccaagtagctgggaatacaggtgcccgccaccacgcccggctaattttttgtatttttagtagagatggggtttcaccatgttagccaggatggtcttgaactcctgacctcgtgatctgcctgcctcagcctcccaaagtgctgggattacaggcgtgagccaccgcgcccggcgtccatactttctttagatatccttcctttttacctaacgtccttcttctggttcaggatcccatccagaaagcaacattacccctcgccatcacgtcttcacaggctccccttgacgggaagagttcctcagactttccttgtttttgttgaccttgacagttttgaggaggactggtatcttagtctgttttgtgctgctatcacagactagctgagaccgatacatgatacatgaaaaaaaatgtattcttacagttgtggaggctgggaagttcaagacgaagttgctggttggtttggtctctggtttcaagatggcgccttgctgctgcatcctctggagaagaagaatgcggtgtcctctcactgcagaagatggaagcgctaaaaggaatgaactccctttgccaagccattttataatgggcattaatccacaaaggatgaaaccctgagaaacatcaagctttaaagcactggttctcaacctttttggtctcaggagccctttatactcttaaaacgttttgaggatcccaaaaaaaggcttctacaggttccatcttttaatatttaccatatcaaaaattaaactgaaaaaattttaaattatttattcatttaaaataacaaggataaacccattacatgctaacataaatcatgtattttatgaaaaatagctatatttatcaaaacaaaaattagtgagaagagtggcatgtataattttttttgtttattttttgtttttagatggaatcttattctgtcgcccaggctggagtgcagtggtgtgatctcggctcactgcaagctctgcctcccaggttcacaccattctcctgcctcagcctcctgagtagctgggactgcaggtgcctgccaccacgcccggctaattttttgtatttttagtagagatggagtttcaccgtgttagccaggatggtcttgatctcctgaccttgtgatccacccgcctcagcctcccaaagtgctgggattacaggcttgagccactgcgtctggcctaaatttttgtgaatgtctttaatgcctgccttctcatatttgtttctgcattcaagttattgcaaaatgttgtgttggttgaagtttgtaaagaaaatgtggcctcatacagttgtgtagttggaaaggcaagagtattttgattctctcttcaaacaactatggacaacctgctgttacaaaaccagaatgcaaaaagttgtagtaaatacaggttaggtgtagtgtggaatctgaaagcatgtgaatgaactttctgagttttgtaacattaaagtccagttgcgttaagctactgtgatagcatatagcattgtcctaatactggaattagtatcagaagtggggtgctactgttaataaataaaaagaaataaataaatcatgtgatactggctcagaagtcaggcagtaggctgtgtggaacctgacatcacgccatgtaatacattggcaaccatttgatccagctgtctgtcatgatgacttggaaagtcaaccacatacttacagagcctgtagacataggggaaaatagtataaaacagaatactaacagtggaccttggttcttgccagttgcatttagccaaatattaaacaaaagagatattcttgggcagcaactggaccatcttcaagtaaaagtgaaaggtaataaacagagtccagacatttgtgcccatgcgggttaagaaaaatccagttgcttctagacaccgtatatgaaaacaacgctgaaaacaagcctttgagtggtaaaggccgattaacactcagcgcggtaacaaagaccaggtgggctaacccgaaatgaaatgagaagcctgtggtgatgaggaggcagagaagtaaaatcaagtttgagcatttcgtttaggagagtttgggctctgattacttgcacatgcaaacgaactggaaacaaacagatcagatgtctaccacttcttcgagggaattgcattgccaaagaagtcatgaaagcagactctatactgattaggcattaaaacaaaaacaatctttaggcccctaaacttgcatgggcaggaagtgggctgtcaaagctgttcatcctctaaggtggacctagttcctagtccccagtatacacttcagatgtggccctggaggacactggacatggaggacctcccagaggatgaggctagggcttcatttctccaatgacctcagctgcctctatttccccttcttcctctggaagtcctatcatcgttattattattattatcatcatttttattttgagataaggtctcgctctgttgcccaggctggagtgcagtgacatgatcatggctcactgcagccctcccaggctcaagtgatcctcctgcctcagcctcctgagtagctgggagtacaggcacatgccaccatgcttggctattttttttttcagtagagatagggctctcactatgttgccagggctgatctcaacctcctgggttcaagagatcctcctacctcagctcctgagtagctgggattcgggtgcacaccaccatgccaactaatttttaatttttttttgtatggacaggatgtacagtgttagaaatggattgcttgcagaggcaggaggatcacttgagcccaggagtttgatcacactgtgaaccatgatcgcacccctgcactccaatctgggcaacagagtgagaccttgtctcaaaaaaaaaaaaaaagagagagagagagagactcaaagataggcaaaaaagtgggaaagctttatagtggacaaaaaggaacgctctaagtctgccctattggcatggtgctgaaggtgggctaactagagatagggggtactatgtggttgactatgggtgcatctttggctttccctgggtgatcctaagttggaagcagggacaaaaattagggaagctgttagttattcatcacgttctggcagtagtggactggttgtgatagaagttattgttttggccaggtgcggtggctcatgcctgtaatcctagccctttcagagttcaacgtgggtggatcaggaaggagggaggatttgggaggtcaggagttagcctggctaacctggcgaaatcccatctctactaaaaatacaaaaattagctgggcgtggtggtgcatgcctataatcccagctactcgggacgctgaggcaggagaatcagttgaacctggggaggcggaggttgcagtgagccaagatcgtgcccaatttcatctcaaaaaaaaaaaaaaagttatcgtttagcttcctcgattgttactggacgtagtaatctggcttcctgcaagtctaactttcagcagactggctacatgggctgtgtactgtagataaggcagtaagtaaagcaaaaattgatagagcatcaaggataaatagaaaatccgtaatcaagcagaagatttgaacacttcactttcagtaactgataaaacaagtagacaaaaaaaatcagtaaggatgtagaagatttgaacaacgtaattaacaaacttgacttgatttacacgtctagaaccctgcagaacacacactttttcaagcatactcagaacatttatataaagtgaccatatggtggaccataaagcagtttcaacaaatctcacaggagtaaaataacagaccgtgttttctgaccgtaagtacagttaacctagaaattgaaaacaaaaagctagaaaaaccccatgtatctggaaattttaatatacactttgaaataacaaatggatcagagattaattcaaataggaatttagaaataccttgaactgaaaaataatgagaatactataccccaaaactgtggggtgcagctgaacagtatatagacgaaaagtatactcatatgtgcataccttaaggagcggggaggattgaaagttaatgggaggcaaaagcaggtggatcacttgaggttaggagttcaagatcagcctggctaacagggtgaaaccccatctctactaaaaatacaaaaaattatccaggcgtagtgaggctgaggcaagagaatcgttggaacccaggaggcagaggttgcagtgagccgcgattgcgccactgcaccccagcctgggagacagagcgagactccatctcaagaaagaaaaaaaaaaaagaaaaggccaggcgcggtggctcatgcctgtaatcccagcattttgggaggccgaggtgggcggatcacgaggtcaggagatcgagactatcctggctagcacggtgaaaccccgcctctactaaaaatacaaaaaaattagccaggcgtggtggcgggtgcctgtagtcccagctactcaggaggctgaggcaggagaatgtcatgaacccaggaggcagagcttgcagtgagccgagatcgcgccactgtactccagcctgggcaacagagagagactctgtctcaaaaaaaaaaaaaagttaatgggataaacatccatctcaagaagttagaaaggaatgacaaataaaccaaaaaaaaaaaaatcaaaagaagaaaatcataaggtcaagactataaagagagtggctgggtgcagtggctcaggcctgtaatctcagcattttgggaagcagaggtgggcagatcacttgagcccaggagttcaagaccagcctgagtaacatagagagacctcatctttgctgaaaataaaaataaaaaattagccaggcatggtggtactgaggtgggaggatcacttgagcctaggaggttgaggctgcagtaagccatgattgtgccactgcacttcagcctgggtgacagagtgggaccctgtctctaaaaaactaaaataaggctgggcgcggtggctcaaatctgtaatcccaccactttgggaggccaaggctgaggtcagcagtttgagaacagcttggccaacaagatgaaacctcatctctactaaaaatacaaaaaattagttgggtgtggtggcatgtgcctgtaatcccagctacttaggaggnnnnctntngattatattttctccttcctacgtcgttattggactgaattcagaatgatgactctcattggagctcttcctgtctcctaactacagtggcttccgaccccactctggttttcacttcacccctctgctgctcatacgagtagatacttccttccttctttctcacttgttgctcttcctcaaccccccccgttggtgtcccctcctctttatctttttctcgcgacacctgcgttctcttgccctcttatcatccctttctcgaggcggtcctttcctttatccagcttaaataccttctcctctgtttatttgggggttgggtttttatctctcaccctccctctaatttctttcctctttccgcacccatcaagcctctcgtggtttctcttcctctactctcgggtcccccccctctccccttctttttttcttcacccccccaagcgctttgccttttttttctttgccctttattcccccc

SEQ ID NO: 7 - DNA, 29430 bp, Homo sapiens
  misc_feature (4336),(4345),(4349),(4392),(4447),(4490): n = A,T,C or G
aggggaagggccggctccgtagctcacacctataatcccagcactttccgaggagagaggatcatctcaggccaggagttcaagaccagcctgggcaacacagcaagaccgcatctctacaaaaacttcttttaaagcttaaaaaaaaaaaaaaaagcaaagaggacagttcaggagaaaagcctgtagaggcagcacactaaggaggagacgcagcccaggcaccaggaggggctggccatgggcactcactcctccagcaggcgagtgcccagcaccagctggcccacccagacacccaggacacggcctgaatggctccgtattcacgtgggtggtaataaacaagcaatacacatagccaataaggacaccttagtaatgttacatcataaacgctgcagatcagggaaatggtgcagggtgaagtgggttggggggctgcatgctacatgagaagtgggtcggggggctgcatgctacctgagacagagcaggccttgctgggaaagaaggagccggcaggcctgggcaaaggtcctggggtgggagcacactggagcagagtgtgggggtagcatggcgggtgctggtcctctgggcgccttcccaccacgtcatgtgcccatgtgcccaaggtctctcgtttcacagccccctgaagctcaggggtcacagctacacagcccccagataccttggcctgccccaggtcattccatccagtgatggacctgctgacctctagcctgacctctgggcagcgtaatttgagaaggaggagaagggagggcaacagacctggggcgatgagggatgcacagggtggcagacacctgaggctgcaccttggagcctcagttctgggtgtgggtgggggatggacaggctgagggctgaagcagctgggcccggccaccatcacaccccaggacccaccagatcaccatgaaaaaccgaatgtcaactggcagcccagagtgcagaacaaacctttcagaaacacggtggtgactgccgcatcatgaacataaaataattacgccctctccccagggatcacccctgcaggagtttgtcccaagaaacaccagaaagaaggaaaacgtctgagtcacaatatttgctgaggccttatttgtaatagcaaaaaaaaaaaaaaaaaaagaacaatctccagcggcaggggtaactagactattgtctccgtggaaaggtagcaccaattaactagtaacaaaatgactgcggtaacaacaaaacgttcgacatgtcaacaccaaaaaccacacacccagcataaccgtgaaccatgatttctactagaatgaatggcagttatgagaaagcaccagcggagacaaagattgaaaaagtaaaggtggcctcattagggagacaagtctctgggtaatatattgtaatactggtaaatatatagtttttaatatattttttaattccaaattccatatatgttcctatgaagctatttctgcaaatatttttttcaggaccgtacatcacaaaggcaaaagggccaggtcagctctccagctgagagtgaccacttcagagcagacggcagactccagggttagcaagcctggctgagacctggcccatgacaatcactcaacccctctgacctcaacatcctgtctgtgaaatggggataattactgcacctccacatcacagagtgcgaggcttaaacaggatgcttcatagaaaagcgctcaagaggtaacagccgggagggggtagtggttttcattaattaaatgttgccttcatccagccctgggccagctccaacacaaagcacacaccatccactcagactcagttgcctggattcaaagcccggcctggcctccagctgtgagattccgggcaggatttcccatctcccagagcctcagtttcctcattcatgaaacaggaagtgatcattccttttatttttatttttatttttattttgagacggagtttcactctagttgcccaggctggagtatgatggcgcaatctcagctcactgcaacctcggcctcccagtttcaagcgattctcccacctcagtctcctgagtagctgggattacaggcacacgccaccacgcccagctaattttgtatttttagtagagacggggttttgccatgttggtcaggctggtctcgaactcctgacctcaggtgatccgcccgccttggcatcccaaagtgctgggattacaggtgtgagccaccaagcccagttgacaactgcttttaaagacacctctggctgctgtggaaaacagcctggtagtgcctcaaaaagttacacatagaatgatcctatgaccagtaattccactcctacatatatacccaaaagaactgaacccctctactcatgtatgtacacatacaggtacacgcatgttaacagcagtgttcacaaagccaaaacatggaaacagctcaaatgtccataaccgatgaacggataaatgaaacgtagtctattcaccacctgacggaggtgagaggggccataaaaaggaatgatgcataaaaacgaatattatggccaggtatggtggctcacgcctgtaatcccaggactttgggaggctgaggcgggcggatcacgaggtaaggagttcgagaccagcctggccaacacggtgaaaccccatctctactaaaaatacacaaattagctgggcatggtggagggcgcctgtaataccagctactccggaggctgaggcaagagaatcccttgaacctgggaaacagaggttgcagtgagctgagattgcaccactgcactccagcctgggcgacagaccaaaactccgtttcggaaaaaaaagaaaaaattagccaggtgtggtggcgggtgggtccctgtaatcccagctctacttgggatactgaggcaggagaaccacttgaacccgggaggtggaggtagcggtgagctgagattgtgccactgcgctccagcctgtgtgacagaaggagactctgtctctaaaaaacaaaaacaaaaaaggcccgacgcggtgtcttacacctgtaatgccaacactttgggaagccaaggcaggcagatcatctgaggtcaggagtttgagagcagcctgggcaacacggtgaaaccccatctctactaaaaatacagaaattagccaggtgtggtggcacatgcctgtaatcccagctactcgggaggctgaggcaggagaatcgcttgaacccaggaagcggaggttgcagtgagccgacattgcaccattatactccagcctgggtgacagagtgagattctgtctcaaaaaaaaaaaaaaaaaaaaaaaaactaaacaaaagcaaaaaaaccaatgagtaatgttgtcaagtgaacttcatcccaatgggaatgcagataatttgtttaaaaggcaccatgcacactgggcaggctggcttcccctgggaacgtcttcttttgcctggattcccagttggtttaatcgggcgtagaacactttcttcaatccgggattcaggcacccctgctcagcacaaactcagtacaccccgcactctgctgtgggttcttggcactattaggagaatgtgagggggtgattcagatctatctctagtgggtgcatgtctgccactcccaggaacgcccacttctggcaagtcagtgtcagagaaaggccagctcgtggcccctcctgccttgagtcccaggacccgtgatcagtcctacccggagcagaatcaggagtttgaaaacccaagtgccaacaatctcattttaacccatgtaagcatatccaatatttatatatagaattcataacagatgtctgggcttccattccaatagcctatattttacactgtttatttacatggttacaccaaacaagactcaattcaaggtaacccaatcctttgctactataccaaaataagcaacattttcagtccatgccttatatatattcaccaagcattacactaggcctccaactgctcatcggagcaagctgcagcctggacacaagctagagattaatcagtcaggaatgatcctgcgtccagtgccagcatgatggaagagacagagaaacagaagacatcagggctccagagtcaaggagcctgcaggttagttgggcaggatatacacacatacacacacacacgcacacacaaaaccacccaagaagaaaaggtgggatgaatgcatggacaggtaatgcctggagcctggggatggataagctgactgcaggtggcccaggcaggcttcctggaggaagaagacctggctgtangtggggtangcangctttctaaatggggaaaatctggctgtgggtggagttggcangtttccgaaaagaagaaaagctgactatgggtacacctggctgttggtggaacangcaggcttcttggaagaagaaaatctggctgtgggtggatcangcaagcttcttggaagaagtaaacctgactatgggtggaccaggcaggcttcctagaggaagaagaccggctgtgggtgaaccaggcaggcttcctagacagaggaagatctggctgcggttagagtgggcaggcttctaagaagaggaagggctgactgtgggtagacctggctgtgggtagactgggcaggcttcctggaggaggaagagctggagcattgaaaaacaaacatgacttggtgaatgttgagcatgcccaggcctgatccccagaggcaattacgcactcaagttacttaattctactcacaatgcctcacaaacaacttctctgacacctaacacagctctgggcaccttctagcttcagctcctcaaagcagttattcacgctactaccctgcacacctcctcacaccccaaccccagggacaggagttctgccagatgccaaagctcctgatgccaaagcctgggtctgcttccgggctcctcttggtctaactgtccaccccgcatcggcatgatgtgcaaaaacaaggctttgcaatctgccctgatgcctggcggagcgagtccctcccgattcgtctccttcagaaacacctgggctgccctggtcctgttatacccccaacacattctacagtcagctccgcaagttccacaaagatcaacgctggcgtttttatggcattttatttacagtttttacaatataaaaaaggaaggatgccacagctcagccagcaggacagacagagatctatgatgcttctgctgcaccattgtttgtggtcaagaaagtctgttttcaatgatttattaaattgtggtgggagatggatggtggcagtggttaccagcaacatgaatgttcttaatgccactgaacttcacacttacaaatggttacgacgataagtgttatatgtattttaccacaattaaaaacaggtaaatgcaggccgggcacggtggctcacgactgtaatctcagcactttgggaggccaaggcaggcagatcacctgaggtcaggggttcgagaccagtctcgccaacacggtgaaactctgtctctattaaaaatacaaaaattagccagatgtggtggtgcatgcctgtaatcccagcttctcaggaggctgaggcaggaaaatagcttgaaaccgggaggcagaggttgccatgagctgagattgtaccattgcactccagcctgggtgacaaaagcaaaactctgtctcaaaaaaataaaataaaataaaaataggtaaatgcaaacatatggtatagtaatattatgggctattatgagctacaaaaaagaatgacttgggactacagttacagccctcattcaggaatttgttttaaatgtgggttggtcgctaaggcatgtacacaacattttgacgttcaaatattcctagatttggacagtgagcacccctctaagctggctcttctgtcccagaggtccccaccagtcctccagaacttctttgctttcttacacaataagatgccccatgctcggcttgtacctttccttgccccagccctagaaccagcttcttcgtggacaagctctgactcctttgggtggagaatggtattcagaaacccagacctgggctctggtgtgctcactgctacttggggtcattgcttctaggcctctctgctgatggaggtaggatatacacgtacagtcttccctcttcccagattccgtacttgagctcgcctacttgctaacatttatttatatcccccaaattaaacctcacagcacttctgcaatcactcactgacttgcagagtgtgaaaaaactgagtcaccatcacacgttccaaactgaggtcaactgaggccacaacgccccatcttcttgctccggctgtcgagatgtaagcaagtgtccttctctcggtctagctagtgccatgctttccacatcactgtgctttttgtgggcaattttgctgtataaaatgtcccctgcacatatgctgctgtgtagtgctcctaggtgcatgaggctgccccacgccttacagagagaatatgcatgagaggctttattcaggtatgagttatagcgtagttggccatgaattcaatgttaatgaatcaacaatatacagtaaataaggtgctttttagagacagggtctcactctgtcacccaggctttagagtccagtggtgtgaccttggctcactgccgcctcaacctcctgggctcaagtgatcctcccacctcagcctcccaaactgttgggattacaggcgtgagctactgcactcagcctaaataaggtgtcttagaaacacacataagacaaggttatgggctgagtgcggtggctcatgcctgtaatcccaacactttgggaggccaaggtgggaggttcacttgaggccagaagtttgagactagcctgggcaacatggcaagacctcatctgtatatttttttaaatcagacaggtgtggtggtgcatgcctatagtcccagctactggagaggctgaggcaggaaaatggcctgagcccaggaggtcaaggctgcagtgacccatgattgtaccactgcattccagcctggggtgacacagcaagacgctgtcttaaaaaaaaaaaaaaaaaaagccaggtcaggtatcgaacagttggcaaaaacgttgtgacctgaggctcacaggaacctagcccgatgtttcccctaggagcaatggttcagtattcaataattcagggttcccagtgactttatggagcataactttcaagaataacaagaaccaactgtacgtgtgtatgtatactcacacttttattttattttattttattttttgagacagagtctcactctgtcacccaggctggagtaaaatggcgtgatctcgactcactgcaacctccgcctcccaggttcaagtgattctcagcctcccaagtagctgggattacaggtgtgcccccacaaccggctaatttctgtatttttagtagagacggagtttcgccacattggccacgctggtctcaaactcctaacctcaagtgatccacccacctcagcctcccaaagtgctggaattacaggcatgagctgccgtgcctagcctacatacacttttatacacacatgcatctatgactatttctctatttctgtgcatgtgtgcgtggcagtacctacagtttcagctatgtgtctgggtactgtctcgtccaagtttgtaagcaccttctccaaagtgcaaagcctggcttgtgttactatccatatgtttacttatttgctcaatcaatttacttattagctccataaccagcttcccatctgctccagtagcctctgctgtcagtcacctctgcaccctaccccaccttgcttccggatgctggatgccaatcacccccgacacctctacatagcaccaccctcgacatgctgcttctttatttcttatttatttgtttgagatggagtcttactctgttgcccaggctggagtgcagtggcacgatccaggctcactgcaacgtccgcctcctgggttcaagtgattctcctgcctcagcttctcaaatagctgggattacaggtgcccaccaccacgcccagctaatttttgtatttttagtagagatggggtttcaccatgttggccaggctggtctcgaactcctgacctcaagtgatccaccttggcctctcaaagtgctgggattacaggtgtgagccaccgcgcctggtctgcttctttaaatgccaggcaccaacatttgtgcaatggggtgggaggaaagaacagggaggagagcacactgccggcccctgcactgaatccactgatcaatctgggggcaactgccatctccatctcctgtcttcctatccgtgaacatctactgcagtcctctccaatgtccttctgtaaagttgtattatgttttgcatacaggccttgcatattagttctcagatataatccatatactttatataaaattcaaaccacatttaaaaaaataaaactagcatgactataacggagtctgcaacattctcacagactttatgataaaacatgaaacttcaaagatacttagggtggggcagggacaatgtttaaggctgcctggaagcctccccatccctgagccagaaagtcctatctccccttcaaggggaaatgcttgaaaaagcactgatcaggctaaaatgacagggatcagggagtaatcaaagtacaagtgagctggtctcctccattctgagcacagcaaagttcagtctctccaagtccaagaatcatacacctgtttgccaagaatgaagttcaggtgtctacaagtggctgaaaatattcattgctgggccattaacaacattcttggcaaaaccataccttagcttctcgtggaaatttcttaaggtagaagaaacaggaaacacccaggctcgcttttatgtagacagttccatgaagccagggaccttccccacatccacgtttcaattacctgcacgcagctcacagtgtattcaacatctacgcgtctctcctactggggtggcggtggccactcaaaccctcatgcagctacgatgaccgcaattttggcaacataatttcatgtttttccttgggcttttacccaagtcagtgacacaattctgcagttgtctaaagattcaaaatgagggacttgacatttacaacaataataaaatcttgggtttcctttaaccaagcacatgttctgccttttagagaaagctctgcaaactcaagctggagtgggatacttgctgacatcttcaagcaccccaggaatagctctactcccccatttccaccttggctgaaccatctatatcccaccaattcccccaacatccctccatccgtccatccatccacccaaggacctgctaagccaggaggtctctcccatctaccccacagcctggcctcagcccacaagggctctctctacatgaatcccaccgcaccagagtagaccaagtctcccgtagactccaccctgaccacctccatgcctccagccattcccacccctaaaaaccctccctggtctctacacccagctgatgaatacttggctgaatgtgacctggcctcctggacccaggtgaagcccacgtcctccgtaagcccgccagctcaccctgcctctgcaccttcactggagagagcccgcacttcacctcctcagggcaggcatggctgatgccacccagtggaatctggtgcaaagcagggcccggtgcagagcagggctgcctgcagagcaaggccctggtgctggggccgagcacctccaatgctggccgtggaaccatccctcccattccaggtgctgtctccatcaagaatgagcgagctgctgacatttgcatgacaataatgaataaataccatattttgcttcaaatccagaatagatgtggccagggttggcatatgactgttgggaaaggacagtttgcctcttcccaaaccaacttggattataaaaagcttttcttaacgaccacaagagcggaggagctcaggggcagacaaaaggaaggctggctgcagaaggcgggagagtggggccttcaggggcgggtggggagagagaaagcctggagctgcacccccaaggtctgtgtacatcaggtgctacagaataacaccacctcttccagcttggcccccacctgccctctcccagcccagtcacccagacagcaccccactccccacacacacctcacatctgcccgcctcacactcaccagcttcggctctcaatgcaacctggaacctgcccttggcctctcagctcagccacccccattcctgttggcccctggccccccatcgaattctctctaatcctaatgcacacacttgcacactcaaacacacacacacacacacacacacacagcccagaggaaaaccataattgactgaggtccaggcaagtttcccgagcagggaccacatttcaaaggtcagggaagcaggcgaacaggaaacatacagggggcacgtttgggggtggagcaggaaataagaaatcacttgcaaaagataaaaagaaaatgaggtagctggtttcagacacctcggagcacacagaacaggacaggcgcctccgggtcttccctcaacagggagatgggccaggcaggtccctgctgctccaccgcagagctgggggctatggccctgacaccaaggccctggggcaggcggggaggcagctgttctcctgcctgtgctcccgggcagggcctggccccacaagggaactggccgaaggctctgcttggctactccggaaagtcctgggagacaagcaaaggacttgctaggtcactccaaacggcccagatgtgacaactgtgaagaagccacaccaaagcaaggtgacagaacaatgttggtgacgtcaggttatcagcttacgctcaactccacttacccggactcacccgtaacctgccgtctcttcccaaccagtaaaggatgcctaggtagaggggcacaaggcctggagcataattaccattttaaaggctctgagaagtcctgcggtgaggaagcctagttcactttctctcccctaggatttcccaactgcgcctgatcacagaacattttttcatttccactcaggaaacatattttgaaaaacactggcctagaggcagaagtgaaatggaaaacacaaaagtaaaactgaacaggaggcactgggcagagaacggtcagaggcgccctgaatcctggaccggtggagatccccagcttggcatgctcccctccctgggcccagaccgcctccccccatttcctggataagaaggctaatgcgcatcagggtgaagggcttgcctgggctacacccccaggctcgccccacaccaatcgcgctcctgcgagagccagtgactttcttgatttggctactgtggaattgtttgcaactaaccaccccagatacagatacaaatgacaggatgatcagatgtaaaggacccacaggtctctgtgatacggcttcatgcagccagcatggctagtgccgtgcagaatgagaatgaccccaggcaagtccttgcctcccagacccagaaccccatggagcccaccagggctggttcacaagcactgtctgggtcgggcagagattccagcaagaggagggaacatccatgcaccggagccagttaccagaagcaaatcgcctcttccaaaacccaggctattaatggagtccactgttgagtggagctggggtctagctatggaatactgcacagcagagatcttcctgagagaaagcagttttccctgaaagccatgtgtcctccactaactgtgttttaattgggcgaacgtctgtatctcattgcagtggccgcgcatgtgctgacaaggggctgggggcggggtggggagcagaagctcaggggcctgggagggaaggaaacaggccaccagggctccccagaaggcatgtatctctctcacaaacacacgcatgcacacacacgtgcacacatactctgcaagccctgagttagcaactgtggaatgtgaccagctcagtgatcccaggacaagctgctagggaatatgacatttgattgatgtctgcaaatgtgcgttttcactaattagaaggtttagggcagagcagagaaaaatatgtatttcagagtcccagtttgacctgccagaaaccagcccattactaacattcttattttcaacaaaatatagcattctgattacataccatcttggttccacgcctcctgccttgccaagcccccggaagcggcccaaggccatggcaaatagtgagagaaacagttccagggtggagactgactcaggggtgtcagtcagtggggcgctgatggccggtgggaggccagcagtcatcaccctctccttgggacagttgagtagctctcccccagggtcatgtggccactcaggttcatatgggaggcgagaggagtggcagagtccaggagagtggctccgaagtcactgttccctccaggcctcagtgtcttcatccattaaatgggtaggctgaggtctgggatgacaaggagggcttgcacttactgaaacccatgggaggctgttcgccgatttcttttattgatggaagaaaacactcgtataattcaagtaccaattaaaaggcaggcactggaaccaccgtctgccaattcctagttttgcctataccaaatttgagcaagttaattgacctctcccagcctcagtttcttcgtctgtaaaatgagggtagggatggcccccagcccacagggcagctggaaggattaaagaaatcaaacatctcttagagcccacctggcacactgtgatacacaacaaatgttagctatttttgtctatgaagtctagattttatatcttgggtgttctaaagcaggatacatttatttaaaaacaaggattttcattaaacacgtaccccacagacagcaaccccatggagactgctcttaattcaggccagtatcgaaacgactctaactacaagctttatacaggtctcttggctgtccttcaaatccaactaaggtggtacttctgaagcactgtgcacatgtgtgtgtgcatgcacacgtgtgggaagggcgggctcacggatccctcaggtaccccacccacgcagtctcaagtcacaaagcgacagagcagccgaggaaggtctgtgccccactggaccctcgtgaagccaccaactctacctctgcgccgtgtcctgcagactgggctaccctttgggtggggaccagcatttgatgcaagaaaggcagacagaaaaggaaaagggcaagttcgactccagataacacagacagtaccaagccccagggtccataaatgccacgcagatggaagcatttactgcgaggccacacagcaaacgcacggatccagggacggaggtgcagactgcggtgcccctgagccatgaccctgcaaattaccaccatgggaaaggaggctgccaaaccccccgacagtcggctgggctggcacagactcgtggtttccatcgaggtgggaggaggtgggacgtcccagcccctcccccatgcccactgcagagggaagcggccgtttcccctgtgtggttacaaaggtctcattgttcttcctcacagggaggaaactggaggaccgagctcagaacgcattttagaactggcagaaaagaacatctggggaaggaaacacatttcagaaacaaacatacctttgtaccagcttttattttctttaagtgttgaaaaaataataataataaagacatgccaaatttatcatcgctctacaaaatccctttattgagcaaaacgtggcagctctactttcaaatgattactgttcctggaaaattgcagcaacgtggatgccaaggcccgaaggccgccatcagcagccaaacaaaagatgccacctcgggctccgcgacactgtaccatgccagggaactggacagatttggggaatgccacggtttgcctttaaccccttgcctcctggtctcctgatgcatctcagaggctaacattctttgaggaactggcatttcttagttgtaaatatgcatgtgggtttgggagctgcctgcaaagtccagtgttgacgatcagctttgatttccttggaatcaagtttacgtgtcgagtctggaagttaagaagaatttggagaagctgagcactatggtgttgcaggccctgggtgaactcttccaccaagcattcattgtggactgacagcgtgcgaggggctctgcaggcaggtgcacaggacgaaacacattccgtccgggggaaacctgcaggaaagctccctcttcttcctaaggtgccgggcctagcttcatgggtccctaccctccacgcctgtcacactttctgagtctcatgtgggagctgcttctggttcctgacttcactcagtcctcataggaggtggaactactgtcaccccattttacagatggggagactgggcacaaggggaccaagaaaccaatgcaaagtcacacttgtgggatcagtgacaggggagatcaattcccaggttctttctgcaagagttaaattgttttcatgctgcctaagggggggcaactgaaagaccactgcatatctttgccaaaagggtcaagcacaggagccgcagccagtgggtcagatccgcagaggcgctggggtgaccctccccatacctggagggatgcttgtcccctcctggccttcactgggtcccctcatgaccgtggcctcccaggacctcagcacaatcccggtcctgtgctccaggacaagccctccgtccccaagactgtgaggaaatggaacgaagaggggctcgctgcagcccagcacccacactgccccttctcaggggcaagaaccgtcctggaggacttggctttggagggggagcctgggaggccagtaagtcaacaagcctctactgctcatgggtgggatcccaccgcaggcccccacctgctggggcgggcagggacgggcggcacagcttggccagggcagataacccccaccttggccagggcgaaggcaggacacgtgggctccagcctggccccaccatccctgcacaacactgggcaaagtccacgttttcctcaactgggtgttgacatctgcaggacaggggcatggaggtacagagcgctgaagccacacagcaacctaggagcgagactccatgcctccccggggacccctccccaccatgaggaccatgaaggcttcccatgtgccgcaaggactctggtgtggagacacacgtctcctacacagccaggcctaacgctcttgtaactgggtggtcccacctgggctcacagctggagggccaggagctcaaggcttcgcagggtctgctctcatcccagaggcgatggggagccacagcaggctgcaggagagagggtgggccccctccacttcagaggccccatctggcccacagactggagagcacatctctcagcaaccacggagcgccaactgcgcacagggcctggtcgtcagagcggggcaaaggcactgaccgtcacggccagggcgagggaagacgggtgggcagggaccttgggcagagggggaagaacctggtgcccaggctggccctgccttcagcagtgaagctgagtggggaggcgctgatgcagggggccagaaagggctgctggtcagccgggaggagccccccacagaggaagcagccagcccagacgcagatggcagggtcccctcaacaatgtcctctgaaaaggagaggcggggactgctctggtgacacctacaaatagatagtcagccctcagccccctgccatacttctgacaaagcagaggcccccaggggaggcgcacccgaaggtacctgcacctgtcccccagactcctagagcccacctgaccccatcccaccagggctccagctacaaaataaatgccgaggccagctaggcaaggacgcacactcggtaccgactgaataggctccacgttgtcatgagcgcaacccacaggccaccaggccacactatgcagagctgagatggtttcggccaagcagcctctcagctgagctgaacaagtccagagtccccggggggtcgtcactatggagtaacaattgcgatgcgatggtaaccctaacagctaaccgtcactgagccaggccctgagctaggtacttttcaacgctgcctctctgcagcctcaggacgagcctgtgggagcataaagatcattccctatcacggatggggaaactgagctctgaagcagttaacgtgcttgtcccagaccgcagagctaggagcaggacacaacagcaggtcaggcaggaacgggtgaggggggcctgcatgggcttctctggaggctgcgcatacacgcaacccccaggaccccgaccctgcacctgcagctcgctactgccccctcagtgactccagcaaacctcggggtaggggaaggaggctgggaatacctcgggtgtccgaaacagcagcttctgcttggaggccactgctgcataatggttgctgcccagcacaccccaagccacctgtgccacctgtggtgaccttccagcatgccttggtgaccaagctggccttaggtgctgtgggcagccaagaatagaacagggcccacccctcctcttcacactaacacaaagcaagaggcgggcacttcgactgagtgcatccctctagctcaagggcctcacggatcacaggggtcagggcaagatcccaattctgcattcccgtctgcctttcatcctgctctgccaacaacagccagtgaggctggggacatccctgaacctgtttctcacctgaaacacatcataccattggaccccagccctccgggagaggccctaatccctgactgtggtgagatcagatcactggttaagtacccagaagggccttggtcaggggctccaggggtggggggtgatgggcgtggtggtatcccgctctgggctatagtccaccctgatggaggaggtctgtggtcagaaccgggctgtgcagggcacaggagcccagagggacccccagagctcacctggtggtctctgagcagggctccctcaaccctcagagaaaagcacagcaaggaggccgcccagagcccagcgcctagcacccagtggcgtgccagacctgcctggatcctggagatctctcatcaccctccaagtcagtcatgcccaacccagggacccacagcccacggggccgtgaaggtgtgctgagtccaagaaggccttcgacactgggaagccaagtggcacctcctggtgtggagcaggcggaatcccaccagcctctgctctgccagtgggcacagctggacgatgagcagaaggggctgttgcttaataaacgtcatttccttaagaggataaaacctttcaaaacagatggaaatttttttttaattaaaactggtggccaaagagatggaaagcaccccttgtgcctccctcccatcgtgacccatcctctgcacacctcaagctgttcgctgcccaggtgtctcctgaggcactgggggcgggtgagaatccgtgagccctcggccagccgtggctctctggagctctgccccaggccatcagggcacacgccgggcaccctgggggccacacagggcagagcccagctgggtcagcacacagggccacactgggcacacaagtctctgagcctcccctgtggacgcagctctcactatcccaccccactaggtcccggggatctgtcccacagggtgatatgctgtcacagaccactaccagagccatggcctgctgttccgcccgcagccaggtagtcacttgctccacagggacaggcaacgccgcacttgggggctgctctgcggcaggactagagctccagcagctcagccctcctgagaaggagaactccatgctctaagaggcagacgcagcggacggcaccaaagccaccacaagcccacggggccctgcatggcaggtcaggagtccctgaccactcgctctttgtaaccagagctgcagtggagtctacgaggcaaggactgtgggcggcagtggccacagcaaatgaatgagtgtcccaagggagcaggcggctgcggggaggcacagccgggacccaggagtcctccggcactgcagcaaactccctgggccccctgagcagcgaccaggtggcaagtgcatgaactcccgggggcataacctgggagggtgacactctcttcgtgttcaaattcttgagaacgcattaaaaatatcactcagtcacctactctatagttttaactcaaaagtaccaaagtagccaggcgcggtggctcacgcctataatcccagtactttgggaagctgaggcaagaggatcacttaagcccaggagttccaaatgaacctgggcaacatggagggaccccatttctacaaaaaaagtgttttaaaaaattacctgggcctggtggtgtgtgcctgtagtcccagctactcaggaggctgaggcgggagaaccacatgaacccaggggaggtagaggctgcagtaggctgtgatggcaccactgcactccagcctgggtaacagagtcagactctatctcaaaataaatttaaaaagcaccaagccaggcttggtggctcacacctgtaatcccagcactcagggaggctgaggcaagtggatcacctgagtcagaagttcgagaccagcccagccaacatggtgaaactccatctccactaaaaatacaaaaattacccaggcgtggtggcgggtgcctgtaatcccagctactcaggaagctgaggcaggagaactgcttgaacccaggaggcagaggttgcagtgagccaagactgtgctactgcactcaagcctgggagacagaacgagactccatctcaaaaaataaataaatcaatcaaaaccaccaagactttttaatataaacatttattattccataattccttttttgcatgattaaaaatgtttatataaagtttcctgaaaatggtaagaatgccaagtgaaggctgcaaatgcccaagcccccaccgtggcatctcacggagtctgggccctaggaggctggtgggtaccacgtggacccgagacttcacagtcaagtccctttggggtacactgggtttcccacaccccagaaatatgggctcttactgcaggaccatgggggtcctcacacttggcccagaagctgtcacatagccagacaggtgttctacaacctaggctagagggagctcatgctccagcagaattcgagccagaggaggtaaaagatgggtaagatctgctccctggacagatgaggccttggcctcagaacagttactgatcatctaccagacatcacactagaggcagaggggcgcagacgaagacagcccctgtcctcaaggccctcccaggttgggtggaccatggaaggttccagacagatctggcaagagaagtgcccacaccaggggcagaagatgggcaggtctgctcagggcggcacggcctgccaggccaaaaagttccaacttcagatgctggagaatgggcacgactgtctgagaaagggaaggatgtgatgaaaactacttggagaaaaattaatctggccagagcataagataaatgggcaaaggggaggttccagaaagcaaggagaccaagtaaaagctgatgtcattggctctgaatctaggctttcactgaatatgcaccgcagggcctgtaggtaaagcctcagagcccagggagtctgagtggaggagagggcaggggacagagctggggcctgtgtctacagtgctcaggaggaataggcatggacgtcagctcggaggctccagctgaagtgaggaggcggccagggcagcacggccacgcccggatccagactccttttgggaagcaagttcgctctgggggaaagtttggagaaatggcctttacccgcagaagcaagccccagaacatatcttgctccaaaactatctcgtacagtgaggacgttaagcttcaggtcccctagaggagacagtctgctccttcctggggcagaacccaaggtggccagagcctggaaggcacccagcacccaggctggtgtgttccagcccaggccacacgctcagatagctattaatgccccgttgagcaatttcctgagagctttgccaggcaggtaccgcctccccatctgaactaatacaggggtacatcccaaggaagaaatgaaaggtgcccacattttgctctgggattaactagggaggggagtgataattaactcagtaattatatttgccatcgggctaatgctaaaattagtgtgcattagaatttctttcctgagcagacaccggagtgagttgggcagcaggagtggctcgggcaagtcggcacaaagggcacctccagagccttccacaaatgtcagcaaaacccacaaatgtcaaggccggctccactgcacccagcagatgaattcacttccacagcctgagaccgccagctcatcggaggccatttaaaatccagccctctgacacctgctggatatcaccatttaccgtccccagatcaagagatcaaagggtggaacctgataggacggctctgaagttcaccacaaaagcataaacgtgcaagcagagccaatacgtcttttgaaaaggacaatgaggtgggaatttacataactgatcttaaaatatgttctgatgcttcagagatggagacagcagcattccggtacacaaagacactcacaggcagtggagcacagtgaagggtctggaatcaggacccaggtgtctgtggacactacacataaaagagcagcatttacaatgaatggataggatggaccatcccaccaaggtgttggacaactccctattcactggccagacccctacctcataccatatacaaaaaaaaaaaaaaaaaaaaaacccagacagaataatgtctgaatgtaaaacataaaacagtaacagtcctggaagaaaataatggaggatatatttataatctggagatggagtaacaagggataggaaaaaagccatagggaaaaagtagagttatgattatatgaagcttcttaatatctttatgataatgtaccaccagaaacaaggatgaaggactagctacagaccagcagtgaaacctgaaacaaacagaacaaagaattaaagtccataccaaataaagacctcccacaaatctataagaaaaagataaacaggctggcaccgtggcttatgtctgtaatcccagcactttgggaggcggagatgggtaggtcacttgaggtcaggagttcgagaccagcctggccaacatggtgaaaccctgtctctaccaaaaatacaaaaattagccaggcgtggtggcgcatgcctgtagtcccagctacttgggaggctgagccaggagaacagctggaacccgggaggcagaggttgcagtgaaccaagatggcaatcgcgccactgcactccagcctggaggacacagcgagactctgtctcaaaaaaaaaaaaaaaagaagaagaagaaaaaagaaaagaaaaagacaacagaaaaatgggccaaggataagtgtaggcaatttgcagaaaagtaaataccaataaaccagaaatgagggttgtgcaaatcaaaaggtgttataatttttaaccaaactggaccaaagaaaacaccaaaaaccaaaatcttgtaattgccagcatcagagaggatataggaaagtgtgtgttctcgtagatgcttgcaggtatgaactgctacagccttttaggagttatgtatgtatgtatgcttgtatgtatgtatttgagacagggtctcgctctgttgcccaggctagatctgttgcagtgctgtgatcatggcttactgcagccttgacctcctgagctcaatagattttcccacctcagcctttcaagtagctgagactacaggagtgtgcaatcatactcagctaattttttaaattttttgtagacatggggggtctcccaattttgcccaggctggtctcgaactcctggactcaagtgatcctcctgcctcaacctcccaaagtgctgggattacctggatgagccactgtgcccggcctcaatatctttaaaaacagaaatggacacactctttgactaggaatgtatcctataaaaacacttatacacatgcagagacacacgagcaagcatgctttgtaatagcaatgaaggctggaaaaactcctcaatcaggtaaatgctgtcaagtgcacctgtgtactatgaaatggcacttggcttttaacaagagcaaagacagaaaagcaaaagtacaaagtagggtgtgatggcacatgcctgcagtcccagctactcaggaggctgaggcaggaagatcctttgagcccaggagttggaggccaggagctgggcaatagtgagaaaaaataaaattaaataataataataataaaataggctgggcacagcggctcatgcctgtaatcccaacactttgggaggctgaggtgggaggatcgcttgatcccaggagttcaaggccagcctgggcagcaaagcaagacacccatctcaacgacaaattttaaaaaatcagccaggcaggctgggcatggtggctcacgcctgtaatcccagcactttgggaggccgaggcaggcagatcacttgaggtcaggagttcgagaccagcctggccaacgtggcaaaaccctgtctctactaaaaatacaaaaattagctgggcatggtggcagatgcctgtagtcccagctactgaggcacaagaatcgcttgaaccagggtggcagaagttacagtgagccgagatcgtgccaccgcactccatcctgggcgtgagtgagactcctgtctcaaaaaaaaaaaaaaaaaaaaaacaaggagccaggcacggtggggtgagggagggcacagaagcagcgcctcttctgggggcacccccaatctctagcgatccagaggcctcaggatcctgaagggagaaaaaacgtgaagctccgtgctagaagagaccatagagattggaatcagctggttctattttacaaaaaaaggaaactgaggccctcagaaggtgagtgcctctcaatgccccacagggaggcagggagagggctctgagccctgcagggccctggattcttgcaatggggtggagtggagcctgtgccgcccccaccaggcaccttctcaggagaggagccgttgtcatatccttgaaggggtccttgagcccctcaaaaggctaaaaaccactttcctccttgagtgaaccttcacctcagtttaaccacaagaaaaactacattaaggcccagcgcagtggctcatgtctgtaatcccagcactttgggaggctgaggtgggtggatcgcttgagcccaggagttcaagaccagcctgggcaacatagtgaaaccctgtctctacaaaaaacaacaaaatcagctgggcgtggtggtgcacacctgaggtcccaactacttgcgggctgaggtgagaggattgcttcagcccaggaggtagaggctgcagtaagcggtgactgaatcactgcactccagcctcagcaacagagcaagactcaaaaaaaaaaaaaaaagcaggccgggtgtggtggctcacgcctgtaatcccagcaccttgggaggccgagcgggaggatcaggagatggagaccatcctggctaacacggtgaaaccccgtctctactaaaaatgcaaaaaattagccgggcgtggtggcgggtgcctgtagttccagctactcaggaggctgaggcaggagaaaggcgtgaccctgggaggtggagcttgcagtgagctgagatcacaccgctgcactccagcctgggcgacagagcaagactccatctcaaaaaaaaaaaaattaaatctcaaaaaaaattacattaaggcaaactaaaagatgtttaaaatatatatattaaattaaatacactccaatagagcaaatacgaaaatacccagaaaacacaatccccgcacccccaggacaacctcccagggggtccacagcaagagaccccaagcacgagagacagagaacagtgtccctgtggcggaacctctggcccatcaggctctattagaaaataaggctcttgccactgagagaaagaggcacagtcgcccagcagccacgggctctggcacaccacgagtcaggccagcaaagtgtcaactgccccctacaaggtgacaaactaggacaaactggaaaccagaggctggacctggagcacagggaccaccacatggggctggggaatgggcagggacctcagagcgccacccacatgcctaagagcagcgcgtatgcgcatgcctctgcatggcttagggacacagggagctccccccacccccaacccaggaaggcagcccccactacccaggtagggaacggataggaccagcaccccgttctgctcgtaactcagggctccaggccccctcgggggcaaccagcacagagctcagaccccaaatatcttcacccacctcctggtccccatctggacaagggtgctggggactggctctcagtcacaccctcggggtactcttcaaaggacagctggatgccccagggcaggagcttttggcccccagctccctcaccccagacaccagctcttgggaccccaccagcatgggcaaggtggacaccatcgtcccgattttgcagatgaggaaactgaggctgagggctggcacacggctctccagagctgaagagaatgcagagagcagccggagccagccggtgggtccctgaggccggctcgtagcaagccacagctgcctccgcccatcacacttggacctcactggccccaggacagccctccagggcggcctggcacagagcccacaccctgctgcttcctgaacaaataagtgaacaaggccaccaagccgaggacctggatgtagccccggctcccgccagggcctccccaacagactccccatttggagagcgcattaagtgtttccaaagcctcacaaaccacagatgtccggctgtctcacggcttctgtaacctgaacttggccctcactctgccctcccagcactcctctcagggcccaggcccctcctctgagatgccagcactgactccccaacttgtccccatcacctggctcgttcctgaacctcggcaggagagtctcaggccagatcctcccaccagccacctccaccaggatgcaggaggcatgagacctgctcgtgccggctgggagatgcaaccaaccaagatcaatccaatcagcggatgaactgacaaatataatgtggtccctccacacaatggaatattattcagccacaaaaagggctgaaataggccgggcgtgatggctcacacctgtaatcccagcactttgggaggccgaggccggcagctcacttgaggtcaggagttcaagaccagcctggccaacatggtgaaatcccgtctctactaaaaatacaaaaattagctgggcgtggtggcgggcacctgtaatgcaagctacttgggagcctgaggcaggagaatcacttaaacccaggaggcagaagttgcagtgagccaagatcgcaccaccgcactccaacctgggcaacagagcaagactccatttcaaaaaaaaaataaaaggctgaaacacccatacgtggtactacttggatgactcctgaaaacgttacagtaaccaaggaagtcagccacgaagacgcattgtaagattcccttcatgcaaaatgcccagaacaggcagaaccacagaggcagaaagtcgactggtgttcaccaggggatccggggagagggaacgggaagtcaccgtgtaatgggtatgggttttattttggggtgatggaaatctcttataacttgatagaagagagggttgtaaacactgtgaatgtaccaaatgcctgccttctatactttaatattttatattatataagtttcacctcaatttaaaaaaaaaacaactcgacacctttcacctaggaaagatctggctttagcttgcatttcctgtaactcctgcctaaagccttccagaagcttccgctgccttgtggatcacaaccagactccacaccatgatctggcctctaagggcctctcgcaggacaccccgagggtgaaggagcacccgtgggcccacctctgcatagctgcaaagcttctttccctgtcctcccctctacatgggaagctctgcccgcaggggcggggccttatctgccattctatcgcactcaaccctagcacttcactcggtagcagacaccaaagcaaaacagcaacagcattataccgggccaggtgcacgttaactcactgaattcatggtaggaaggattctattcccattttacaggtgagaaaactgaggcacacaaaggtagcatcagcttcctaagcctcccagcacaggaagcggccaggctggaatcagaccctgggcgcaggggctctgtccacagtgctaactaactactcctgcccccgagggctgcagcggtgagtgagtgagtttgtcagtggactggatgtccaaggtcatacaggaaaaatccagactattgtaataacagcctctagaccggctggggccagaaagatcgaggacgctgacacacaactgcgctcactgcagctctgccagggatggggctaaaggtctcacacagggcagttagggctccccatagcctgggagaggaacggggtgagataacagaaactaggtatggtgcccgaagtcaaacagccactgagcatgtaaacccaggtgggtctgaccccaaacccctccacccccatcagccctgcaacccgtcgctgcaagggagaaagcaactcagaggcctcacctgcctacatcccccacccgtgtgtgtgagttctactaaatgcctgagcagtgacacagcacggctgaaattaaacgggttccaaaaacgacaggaagcacgaagtgaatctccccaggaaagtgctgaacaaatgctggatcgggttcaccggcgaatttcttggaactgaagaggggagctaaacacacggggccctgctttggaggggactctctcagggtgctccacacagcacttggttaaccccactcagcccttctgggctctcccagagggcccggccttggccttgggcatctacaggaggaacctccagggggagagggggtgcctggacaggccggccctggaacaagcacttgggccccgaggagagaggactagggcttgggagctggggaagttctcagcactgggaccactagaacaaagccatttccgtgcgttcacagcttccaattgcaacaggaagcaatcaggaaaaataattagcggcccacttactggcttcgctgaggtccgaggcatgtatttcacacagtaaaaccagggatataacatcaaaaccgttctgcagaaagattcctccctttccttccattttaggcctggatcaccacattcactggggctcccaggccttgctgcctaatgttaaaataatcaactctatttttgcctcacacacaactgaactctacagctataattctttctcctcaggggctcgaaccacatggacgacaggcatttgactccagcaacatcaccccaaaacgtgcacaaaacccaaaactgcaatgaggtgaaaggcaacgcggtcggcctagaaaccccccctttaaaacaaacagtttccccaaaaccccttttgcctccttgacccaggcatttccggaaaaaggagcggcgctggcctgtactccccagatactgtcgctgttttgtcttcaccttgttttgctagctccagacaaggccccacaatgtaaacacgctcctgaaagaggcagatttggggtgaaactgtccatagaatctctaggcttgggtcagaggcaggaggacgtgaaacaaactccaagctcctcctgttccccgctgtcccccacacctccaagcagaggctgcagcctgggggatctgactacagggccaccccgctgcaccattcacactggaaatattcagggagacagctgtttgccttaaggaggcccagacaaaggggcccgaggtcctccccgctaaactgccacaaacagaacaggagccgcggcgtgcacaggcacttgcggccgtgccacttggccagccatactccagaaaaacaaaacacgcacatccgaagagaatgatttaggtagcaagaggcttgcttgaaaaaccacatggcaatctccaaattaaaagaacatgtgtagcgtttcacgactgcttaagtttcctgagtcctcctgacctcaactccaccccctgggaaacaccaaaagttggatgagaaagttcccccgccctacctctccccacgggagtgtacaactgaggcacaagcctgcctcccccactgccccgcgatctgggaccacgtctcctccgcgtagccgacccggggatggacactatctggggacccggcggccacacggggcattcgggtcgcccgggcacctggcaggtgtcagtccgcttggaaacccacagccacgcggctcacaggagcagcgccaccggctaggccgccccgcgcccgggctcagaactttctcgctgccacttcagcccgtcctcggagcacgcggggcggccgcgcggccgctggaaacaggcttgcgaaccggctccccgggccaggcccgcctccgcgccccaagtccccgctcggtgcccggcccgggccacacgggcccagcgcgggctcggctcggctcccggcttcccgcgggctcgggcaggtgaggacccgcccgcgccgcacctggcggagcgggcgccctcctcgccagcccgggacgcagcgtccccggggagggcccgggtggggagacaaagggcccgcgcgtggcggggacgccggggacggcagggggatcccgggcgcgcgccccaactcgctcccaactcgccaagtcgcttccgagacggcggcggcgcccgcgcacttggccgcggggccgcccgggccattgtccgagcaacccgcggcccgtcttacacgccgggcgcgggaaggtatcgaatcagg

SEQ ID NO: 8 - DNA, 33769 bp, Homo sapiens
  misc_feature (33739),(33749),(33758): n = A,T,C or G
cttccccttacactggtccttcgacccgcctcggatgaaaactgaatgggtttagccttagaggctctcggtctctaagggaggtgggtcaggatgccggggacagggtcctcttcctggggcaacgtgggggaacgagccacctacccctccactgaattgccctggggtgtgggtaccgacggctcattcggtgtccagggtctgagatgtgttgacaggaagaatgaaaggggatgggagggatggggcgaaagaagccacctgcagccccaggaactatctggccagcacaccgtcacccagcggcctgagccacccctgccagagccaggaggagaccctgccaatgggtcaccagtgtgcaggaactcagaaggtcatcacagttaataccctccatgccccaatgtgggaaaacaggttttttcacaacaaacaagataatttttgttattttggcaaaaggaggcagggcagccccggacacctccatcccacctcatcacccagccgcagggccccggccatccctgcagacagagtggatgtcacaacctccctgcaccgaaccaagtgcagctcccaggccacaggccacccaggaaaggtccagtggcccccggaggctcccaccgcaggcctcccaccacagccggcaccaacccaggatagctgtgttctcctggcttcttttcacacgggtagcagaaagctgagatccggggaaagctgagatccagggaaagctgagaatcggcctctgctgcccggacgcccacccccagctctgctcccagctccagggcctccttctcaggtgcccttacaggaggcagagggcttgagccacctcctgggcctggggcacgcaggatgaacggggtcacggtgcaggccactgtccactgcgcagatcccaaggccataaacagcctggccacagtggcttcccagctggcaggcggccagattatttttgttgtttagcaattgattaagtttctccgctgcccccaggggtaagtggtggggcaaatgccgcaaccgcagcatttgacccgggatcctgtgccaagtgaccatagggtcacaaagcacaagggaagtggctgggcccgatgctggctctgctggaacctgaggccggccactgtcacctgcacggtgcctgggaccttccagcaagcacagagaagctatggccctccaggagcagctggcaggcaccttggcctgcagtcaggggctctgtctgctcagctctaaaacaggaaagtcgctgctctgcctggggtcagggcagccagagagtgaccaagtcagtgccggcctcaggaagggacctgcaggcgggtcccttcctctcccatccctcggtgccagccagcccctcctgtggccccccactgcctgcctctgcccccatgccccaccacaacctcaggcccatggctgcatggccactccccaggcaggcagtggggatgggatttcaccatgttggccaggctggtctcgaactcctgacctcaggtgaggagttcctaaagtgctgggattacaggcgtgagccaccgcgccagccctccctgtggtactaaacactcacacccccttgctggggaccctggtgagggaacacagcctcacaagtgaagtgtggttttgttgagcaaatgacgcctgggcagccctctcatctttgcctaaaactgaagaatttaggggcgtggatgtataaaacagttggtgacttaaatgaaaaagaaggccacactcccccctttaggcaggcggcctaattctttaaaagccagcacagggtgcctttctgaacccaggcacacagtaggtgttcaatggacagcagcggttacttgtactgctcatgacaccctgtctgtggcctctgcagctggctccagcctgacgcatggctgcgcccctccgcaaggccaccccggtatacatggaaactctgtggagaaggccttgggggccggccaggacgccaggcccagatcccatctgcgcccttcctccatagacctcagcgagctctcggcaccatgtgcctcaggcccatttaagaagtagggccggccaggcatggtggctcatgcctgtaatcccagcactttgggaggcccaaggtgggtggatcacgagatggtcaggagatcgagaccatcctggctaacacggtgaaaccccatctctactaaaaatacaaaaaataagccgagtgtggtggcgggtgcctatagtccaagctactcgggaggctgaggcaggataatcgcttgagctcagcaggcagaggttgcagttagcggagatcgcgccattgcactccagcctaggtgacagagagagactctgtctcaattaaaaaaaaaaaaaataaaaaaaagaagcagggccagccacggacgacccctcacacagctcccaggacgcgtgcctgggtatagggctcaggaccatgaccgctgcagtggcccccaagaaacgttacttttgtcacccaccccgcctcagtggcagtagccaaaataacggattagaatggaaccatgtgacaatgccactgccccaactgacagaagatggctatcagcagttcacgcggccccacctatcacaagtgcagggcactctacaacttatgcatccttccccagacaccgtcctttcgaccctcccaggtcagcaaggcacacagggcctacatttcacagccacacagcagagggctgaggctggaactcggatgctctgatttccgttcaatcacatccccagaggtggcacagagacggggggcttctcttgacaaagtcaagaaagtcactgccagctccactgaagaccaaagaacctcagctctcaaaccctcttgaaggtgttaccgaactctcccagcctgtttcctgggtcccgatgttggtcccgtgggacacaggaagaggaagaagctccctagagcagagcctggtgcacctgccacactctcagagggctgcgcacgggcggaggagccgtgtgcaggagtggggtctggatggaggggcgctgtggccgggggcagggggcaggggaagggtgctccaggtggtgggcacagcacgagcaggggcagggaggtccacactcagatgtgcacagggagaaacaaatcgtgcatttccattggaataggcggtaaaaggtagaaaaacagagtgggggccaggaagggagtcggagccttctagtgtctctctgcaggtgagcggcagcccgaggtgtcagctcagcagacttggggtccaggggccgtgtcttctatcactgaccccagggcacacggaactggggagggagagcagaggcacagggcacggtcagtgaaacgaaacaaggagtcatcaccaaatgcggaaagggcaaggagtgcccgcagccgcacaagggttctgtctgggcaacgtgggcgtcccaccaggccccgcaccctgcaagcgcaaagctcgccactgaagataaagggaagctgttggagctgcggagctggtctggggtccgcatggagctgggcttatgctgcagtcacaagggggacatggaagaggctgcaggggacaaaaccagtgaccacagtctaactctgagcctgtggaaaggcgcccacagcattcacccatcccagagatgccattccccctgtgcccccgctccacggtgacagcgttctccaggaatatgatgcgcccctctcctcttgcatcagccctgacagtgagtattcaggccaaaaagcagaagagcacagctgcgtggttccatttccatgtagttctggaacaggcaacgctaatccaaggtgatagaagtcaggagagtggtggagggggcgggggttgaggatggcaaaggggcaccgggaactttcccagtggtagaaatgttctctgtctggaccgtgtggtagttatgcagacatatgcagctgtcaaagttaatccaaatgtacacgttaaaatgtgtgcgttttattgcctgcaagttatacctcaattaaaaaaataaagttagcactcaggcttcttccacaacttcctgaaccgtgtgagctgattttcttgctattaaaaattcacggtccatggctgagaacagcagctgccttctgtttgcaaagtcaacgccaatcactgcccggccgcggcagactcggccccacaggacctcctttcttttttccctttgacctacttccctgataagtgacaagacagccagactctgggaacaaacgcccgttattcggccccgagctgagcgggccctgcttcctgagctaatccgcccggacagacggagggacgtgaggggctttgccgtcggctccagctgtcagtctgcccgtcagactcgacagtggccccctctgttcctcccgctgcccccactccatccccgacttctttttgtttcctgtccctgacagacgaacatctgttaaaactctgtctgggtgagctgtggccagcggcccacaaatccccaagccgcaccccagcctcatctgggcgctgccgggagcactgcctggccaccctctggacatagctctgagagccaccggccagggcacgtgtggcccgagtggcatggtgcacgccgctaagcccactgcccaaaggcccccaagcaggagggatgtgcaggagacaaaagtcaaaagaacaggggcacgttccacagaggatggggctggaggggtggcagtgaggaacagcagcttccgaggatggcggtggcaactcccaaataaggcctcactcctgctgtttttagctcattccacataattggaaaaacatggcagaaaccgaagccagctgctgccttggtcctggggctgtgtggagggggtggggaggccggaggcccaggctctgcactcgactgctggggatgagagtgactctgagctgcagagagcagcatcgcagccgccatggtcccattgagccccggccacgctgggcggcagaggctcgtgggatatacctgccctgtctcatgggggtcacttcaggaggggcgggggagccaggacacagcccagggctagcggtcaccctgcagctcaggggccacgtaaatagtgccaccttgaaggcacacagcagtgcggggccccccccgccaccaacgcatccctacctctaggaggccgcctgtgtgcccctgggaacgctgctccctgtcccttggggtcctggtgtgaccaccctctcagccccttccttggggaaggcacctgactccctacacccagctggctttcatttgctcaaaatcaggaaaaagcagaattcaagacatcacagaaatgtcttcgcctgtaactccatgaaagataaacggtcagacacccaggagggagtcccagggacccttgagtctcacctgaggctctggcttcaaacctcgagatgtttccagccatgctagcgccgccccccacaacctgccccacacagtcctcccttgggaactcacagatttggcccccacctgccccgtttcttctggtggagtgggtgcgttgggttggggtggggctggggactctggatgtgtcttaagagtctgagtgattctgacacagccaggccctgcccccctcctgaccttcgccccacaggaaagggagccacacgcctgaagcgcccagcacacccccctccgtcctccccaggtcacccgctggccgtgtgagccgtgctccccactgccccttcacccaccccagctcctcctggcagcacccagccttggaagctacttctgattacaaccgccgaaggaagactcgctccctcggcactgacccagacagcctgcaccatcacgctgctcagcacaacccacacagccttcctccaaaccccatggagcggggagtataatcaccccctttctaccaacggacaaactgaagcacagagaggttaagtcactttcctaagctcccaacacgatgacaaaaaatagaaggtcagcccgcaagtggaactaggtgctccaagtccccggtctgcctgacactgcacctcctcgccgccacggtcccgggtccgcctgacactgcacctcctcgccgccacggtcccgggtccgcctgacactgcacctcctcgccgccacggtcccgggtccgcctgacactgcacctcctcgccgccacggtcccgggtccgcctgacactgcacctcctcgccgccacggtcccgggtccgcctgacactgcacctcctcgccgccacggtcccgggtccgcctgacactgcacctcctcgccgccacggtcccgggtctgcctgacactgcacctcctcaacaccaccacggtcccgggtctgcctgacactgcacctcctcaccaccaccacagtcccgggtctgcctgacactgcatttcctcatcaccacagtcccgggtctgcctgacactgcatttcctcatcaccacggtcccgggtctgcctgacactgcacctcctcaccgccacggtcccgggtctgcctgacactgcactttctcaacaccactccttggccggctcccaactacaaaccaagccatgtcttccatcctgaatcctcttggcctaaacatcactcacaatgcctccctcgggaacaggcacaagtcccaccagcacagcctccttcgttacctgcgtttccgctagcccagggccagctccagagccctcaccacagagcctctatccttcacccccggacactggacctcaccaacccatagcctggaggagatccctgtgtgaccccagggcctcctctgcccgactctgaatttcactgcccaacgtgacacctcggaaggctctctgggcactggcagccctccatgggcaccgctccttctggccagctctgacatcccggctggtgaggtgccctgcacgaggcctctgcccactgggacctcacagccgtgctgtcagctgcaacaagcgacagaatttcacgttttcttcacgttgcccctgggtgagcagctccaggtagttttcagtcgaggcgaggcgtcccgtcagcagccaggcggcacagctaattcatgcccgccgggcgcacggccgcaataccaatgggcacctgcagcctggaaagccacagaggaaccgagaacagcgactgtgctcaggtgacaggactgtggtcttttaacaaaacattttcctttaacgtgatattttacggcaaggaatgaaacctggagggcaggacatttggatactaaagccccaggctgccgcgtggtctgctttgtgaagtctgaagcccgcgccccattctggccccgctcacaggtccggctctgactcaccagcttcaatgctaggccgtgcctgtcctccaaccagaacatgacttccttaaggacaaagccgtttctcgcccatccccatctccctctggattaagaaatatgggaagatcttctagaaccacctcaaatttgcagagagccatcctggtgacaaacccttgaaatgcttctaagaagagtttaggtttcttctcaactctaaaacctctagaaaactctatttccacaccagctgcccctggaacacttcagcttcaaaagggcccagggcagggagacggaggagccagcatccacaccgagcaccagcctgttaattaacgggaagcgggtggggcccatctccaggcagctctgaggtcagactggggaaccatgcttacaaaaaaaagtgaactgaaacgctcacgtcctcatgcaaaaccagactcccagttgcatctttctgtctcattgaggagctttttcctccctttgacagaacaccctacacacggcatctggaaccaaagcagaaagattcaggctcagagtaaaacagtccccacactggctgcatgtggacgttcccggcccagagtctcgcccaagcagggcctataaatgacacaaaatgtttttctcctgcgtgccagtcatgctccaactgagttatgtgtaaaagtgcctctcacggctgagggcaaaaacagttcccacaagactagagaaaggtgacccctgacggctgagtctctagggagcgtggagctgcgtgctcagccctgcggccctgacggctctggaatggaaaagctatccaactggaagggcagggctcgctgctagtccagcggtccaaccccacaggtgtctgtggtgtcagctccatgccacagagcccagggctggggccagagccaccaggccccctgccagcctgcaggggcctcctcctctgggtagcctaaccaccccctgtgagcgcaggcagcctcctctaatcaccacagggcctgtccccccctctcccccgcttgcaggaaaatgagccctgaggactccccagggctgctctgggcctggacatggagactgggaattacatttgcagaaggagcgcaatgcccttgaagggctcagccacgagcagccagtccccagggctcagaaggcccagctgttagaaccctgggagccagcaaagagccaggggctccacctaagtctatagcccctgcctcttctggttgggaaagaaatcaacgcccctttactggctcccactgacagcccactcccccaggtatgggaggattctgggacgatgcaggcaaacctggaccctgagtgaacctgccccagctctcacgggcctggcaccagccacagcacctaaggcgccggtcatggtgacaacatgaaggtgataagggcatggacagtggacatggcagctggacactgggcacccactggatgccaggcacccagcacggctccgtcacccctggatgagcagtggccctttgcaagccagggtagcctgggcaagttatttgggggtctccaagcttgtccagctgtgcgacttcactgagccatgagtctgggattttatcagggcccacacccgttcctggaactctgatacgtgagggagccacacagggacccttaacaaaagctcccagggcaacatgttctcttgcctcagtctcccaaatagctgggattacaggcgcacgactaccgcccggctaatttttgtatttttagtagagacagggtttcaccatgttggccaggctggtcttgaacccctgacctcaaatgatccttccactgttagggcaaggcacctgacaggcacgactgcacgatctgcttgttgggggctgtgtccattccccactccttcgacaaatgtccacacccagccttgctttgacaccccaagaacagagatggtgacacctgcttcctacatgcccattgctctcccaaggcagacatccccagcagatgcaacacagtgtttaggcagacatcaccaatcgatggtggcaacagacaccaggccctgctccctctaactccagtggccaggccccaagccagctctcacctgcccactcccaacccacagcagcaagactcagaaatggcaaaaacacaaagagaacagaaacgccccatagcgggaggatgactaaaagacatgtcttgataagatattgttcaggcataggccaggcacagtggctcatgcctgtgatcctagaactttaggaggctgaggtaggtggatcacctgaggttaggagttcaagaccagcctagccaacatggtgaaaccccatctctactaaacatacaaaaattagccagacatagtagcgggcgcctgtaatcccagctgcttgggaggctgaggcaggagaattgcttgaacctgggaggtggaagctgctgtgagccactgtactccaacctggacaacagagcaagactctgtctcaaaaaaaaaaaaaaaaaaagatatccttcactaaaactcatgtctttgatacatatttacctcctgcaatcgcaaatgcttctgcagtgcataaagtgaaataaatagcaggaagccttacggttcgatcacccacacagacacacagtcacatacaggaaaaacgcagggagggctggggaacaaaaaaacagaagataaaatgtggagacagacacaccaagagagtaagagaccacctccagacctcccttcagcttctcaaacacacgagccgggcccgttacagaatttgcggggaccgctgcaaaatggaagtgcagacagccccttactcaaaaggtaggaatttcaggtcaacaacagagctcacctcatatgactacacaggtcacacagcccgtgaagtcggtcccaacaccagcatgctcctgcctcaaagccgctgcacgtgctgttccttctcgcctttccctcttttagtccttcagatctcaggcctcctgagagagacctctgacctgccggctcaggcggccacacccccagtacaggagtctccggctcagcccctgctgtgttccgtacccgatccaggtctgtcctatgtccatctgtgtgccggcttgcttcctgacatggcccccaccacacgtgtgcctcggggcaggggaacaggcccgtctcattaactgctttcttctcagatattttctggaatatttgtggatattgggcaacatatatgctccacctttttcagactagccaggacgagctgcatttttttttttttttttttgagacagggtctcactctgttgcccaggctggagtatagcggcatgatcttggctcagtgcaacctccgcctcctaggctcaagcaattctcctgcctcagtctcccaagtagctgggattacaggcccgtgccactactgcccagctaatttttatatttttagtagagatggagtttcaccatgttggccaggctggtcttgaactcctgacctcaaatgatccacctgccttggactcccaaattgttgggattacaggcgtgagccactgcgcccggcccgagctgcctgttttacacctttgccatattccggtgattctctctcccctccgtcccccggccctgactgtggtggccactccctgccgtcatgagcccgtatgtcctcactctttccctttccgccaggacttcaaccaacactgcagagcgcagggtccagctccagcactgagttcagcctcttctcaccaacagacaggcaggaaagaaaacaaactctgagaaggccaaggttcccgggcagccagcaagccaagcatccttctccgctgaggcttgtgcagccgaggcaccccctcctccagggagcaggcagcgtcctggggcagtctgcgagggagaccagggcccttgctccaccagggccccaggtatgggggcagcagcaaactcatggctctgggagccagaccccacctgctagaacctactatgccacctgctgtgggcaaccccaggctggtgacttgccctggcctcctctgtaaacaaagggctcatccaacctggtcaaaccactcctccccttcaagggtctataatcctcccttaacctgcttggtccaaacccctggtgtcgccaggtcactcaggaggcagctcatctggactccttccctgggtccagtttctctctcaacattgcctttgaggccgaggtgaacggtcaacagcgaagggccccagaggtgatggaggagcgggtgtccaagacactcaccctttctaatgcactgactccctcgtggactcacttgtgccgtctcccccacccacccagccccagagcccagagtgcgagcgccagaggcccgggattctgtctgcaccgcggggtccccagtgcctcggagcaatgccagcacccggcaagtgttcgacaaatgcctgctgaatgagcaaatggatggatgaacgaatgaatgagcaagcagatgaatgaatggggtgctgtccagagccgtgaggactaggccgcccaagtccccatttctcaaattctccttctcccgacttgggaaacaagatgcttggtcggggaggctctccaaccatcccctgcagcagccggcacagcggacagaccctttgatgtaacagccatgtcttcattaaagatgccctgctctcagaaagagaaagacaaatacaaacctggaaaatcctcaccaaacgcaggacccctgccagggagcagagaaaagacccacacgccacgggcgccacgaccacacacacaccccagccgctgcacacaaacacagaccctagccagcaagaacagggggaccaggaaactgttcctaaagtcaggacccccatgtgctcagacagcagtgagagcaaggacacttctccatccaccggatgccaggagagtccttttagggggccccacaccgagactctgcccttaggactgttcctgagtgtggaagccagcccacttggaagccccctgccctcccgagtgggacaccggcacaggaagcaggccctgtcccccaccactttctgcaagctgggccccatcacgctacagaaacggggaggactggtcccagggatggcgctttcctgacacctctcgttaccccctcgcttgccaggccccagggtcagccccagaggccagactggctatcccaggcccgggagcatccccgaaggcgagctgcatcctgaacgtgtgtgatttcccgaagggcccgccccgaaccgacacctggaaagaaagatcctcagccggtgccccagaggagaagagccatgcctcactgcaacacagtcccaggaagcaccaagtgcctgaggaccaaggcggagagtaaaaaagtggaaaatatctggggcaaaaataaaacaaaacaaaacaggattgacctcctgggctcaagcaatcctcccaactcagcttcccgagtagctgggaccacagacttgaatcaccacacccgccaagtggatcatttcgaacgggtttgccgaggttccttctggggcacccccggcggccgcaacccattcccgccaggccccgccccgcccgcccgccccgtcccgtcccaccgcctcacctgccttacacgtcctgccgttgtcctgcagctgcacacccgtggggcaggcgcatgtgtagaaaggctcgcttggggacagcaggcacaggtgggagcagccgccattgtcctcctcacagcgagtgtggactgagaaaaccaggacagactgagagaaggttccagaagaggaccgtcacttgtttctgaatgagtcacatcctgcctcgtcccccgtgacagcctccagtgtgtccctctgcccaaacatcggcctcaagtggcatcagggacctccccgcgggcaccattccacctgcctcatcgctggccccgtccacatggggccctcagcctggccagacggcctgcaatttccccaaaaccagccgtgaccttcctggccaccctcacacccagatgtgacctgcccatggagtgacatcctccccatctgcttcctcccaccaagctcctatgactagaacaccctccccagctcctcggagcccccaaaggacacccctctgcaaaggctgccccccacgctccaatggccggggtcaggacctgcctgtgtggtagtgacgggaaccccagagacaatgggctcctgggcaaaaggcttgtcttgtctttgtgctatgtgtggacccagcagcttccataggaacactgtccttcttgctgggatggccaagcttgtcactctcccaagccctcctatgaccaacagcaattgaacggaactcgataaatgcttccagcacctcattcaaaccaggggaaagctgggtgtagcagccccaaaatacggatataactggaacaacaaactcatcaaaatgaacctctccctccctcatgctgccccaagtgtagatgggttttgtgaccacgactttctcaccaggaaacagctccagagagccccaccctcctgtgtcctgctctgggaacagctggcacccctaggccccacatttcaattcaaagtccaaaccttccataatggcctggccagaaatctccatccctggtccctgtgggagtgggccactgtccccagagccgcagccccactgtcacagaagctggtgcatttccccatcagggacctctgtcacaacccagcgtggcccccaggctgagaactgctgattctgggcagattattcattgataaatacgcgacttgcagggccaagcatggtggctcatacctgtgaccccagcactttgggaagtcaaggtgtgaggatcactggagcccacgagtttgagacaagcctgggcaacgtggcaaaatctctcatctctattaaaaatacatacacacacacacacacacacacacacacacatatatatgtatatataaataaccatatatatatatacacacatacgtgtatgtgtatataaatacatatacacacacacacagacaacttcttctgggccttgaaaacgaggcaaccttccttggaaatccccttgccactgctgagcctgaaatagcccccatgagctctgcagaggggtcctctgcaggcccgtgtcccccagccagccacacacctccctccattgcagcaggtacccctttagagagggggccccccagagcatgggcttctgcagggaggggtcacctgcccccccaccccacccacgcccgcgcacccccacgcccccgcatcctcccactcccctgccccgcgcccccgctccccccagccccctcaccctctcccccgtgccccaaccggcactcacaaaaaggctgccgctcctggctcagcacctggatgtccatgggtgagtatagggcactcaggatctccttcctcttccccccagtgcgcttgttgcaggcatggatggagcgggtctgccagtctgtccagtacagagtgtccccggagagcgtcagggcgaaggggtgcgtcaggctgccctccaccaccttctgcctgcagtcagggaagcggggtggaggagccatcaggagggtcccccgacagtcattgctgctgacccaattaatttctttttttttttttgagatggagtctcggtctgtcgcccaggctggagtgcagtgatgtaatctcagctcactgcaacctccgcctcccgggttcaagcaattatcctgcctcagcctcccgagtagctgggatcactgatgcccaccactacgcccagatgatttttgtatttttagtagagacagggtttcatcatgttggcaaggctggtctcgaactcctgacctcaggtgatccacccacctcagcctctcaaagcgctgggattacaggcgtgcgccaccatgccaggcttcccatttgctttcaaccagacaagtgaggccaggtcaagagccccaggagctggcgccctcgtacatttctcccggcgtgcacagggcacctcccaaacacagcctgtgatggtgacacacgggctcccccaggtcaagtggcaaagtctcccccagggaagaaaggaggaagccatgcctggcaaaaagcacacctctcctgcccaacgctttaacctctgtatacaaatcaggccatgtgcactcgctccttcttacaatgctcataatttatactttcagagtaaatgaaacttggcatcaacccgagaaacagctattcttttctagatgcttacagtgcccagcaaatgaggactcgggtgtaatgagattatggacactggaaacaggatcataatgtgacgtggtcggtaatgtgcagttttatttgcttaatgaccctcgccccgtgacaggctccctgagggtgggcctgggggcagaggtccccgccacgtccccagccctcagcacagttgccaggagagggtgacactcatgaagtggcacagggaagatgggagctgtgggctctgcagatccaccacctcttctgttcatttttgttgatgctgttttttaagaaaattattgaagtaaaattcacaggacatacgtttacttttttttttttttttggagatggggtctcactctgtcacccaggttggagtgcagtggtgtgatctcagctcactgcaacctctgcctcccaggttcaagcgattctcccacctccgcctccagagtagctgggaccacaggcgtgcaccaccacacccagctaatttttggggggtatctttttggtagagacagggtttcgccatgttgcccaaggctggtcttgaagccctgagctcaggcgatccacccgccttggcctctcaaagtgctgggattacaggcataagccactgcacccagcctaaatttaccactttaaagtgaatagtgttacctagtgcattcgcaaggcggtgcagcctccacttctgtctagttccaaagcacttccattgccccacaggcaaaccccacacccggcagcagtcatgccccagtccccgcccccagccccggcaaacacttttgatggacttaactacacacattctcaacatctcatataaacggaatcacaatatacagcctctgatgtctgtcttctttgacttggcaccatgttttcgaggttcatccaggctgtagcatgtcagtgcttcatcccgttttaggggtgaaccatattccagtgtgcagacagaaaccaatctgtgcatccattcacccactgggggacctttgtgtcatttccaccctcggctgttgtgcacagtgctgctacggacattactgtccattcacattttgtgtgaagacctgttttcgattcttaagagtatacagctaggagcggaattgctgggtcatacgtaaatcaatgtttacgtctcaaggaatcaacaaactgttttccacaatgttgtcttttttgtttgttttctgagacagggtcttgctctgtcacccaggctggagtgcggtggtgtgatcatggctcactgcagcctcaatctcctaagctcaatccatcctcctgcctcagcctcctgagtagctgggaacacaggtatgtaccaccatggccagctaattttctaattttatttttttttgtttttgtttttttgagacagagtctcgctctgtcgcccaggctggagtgcagtggtgccatctcagctcactgcaagctctgcctcccgggttcacaccattctcctgcctcagcctcccgagtggctgggactatagtcaccggccaccacgcctggctaatttttttgtatttttagtagagatggggtttcaccgtgttacccaggatggtctcgatctcctaacttcatgatccacctgccttggcctcccaaagttctgggattacaggcgtgagccaccacgcccgaccttacttttaattttttaattttattattttattttattttttttttttttgagacagagtctcgctctgtagcccaggctggagtgcagtggcgggatctcagctcactgcaagctccacctcccaggttcacgccattctcctgcctcagcctcccgagtagctgggactacaggtgcccaccacgatgcccggctaattttttgtatttttagtagagacagggtttcactgtgttagccaggatgatctcaatctcctgacctcgtgatccgcccgtctcagcctcccaaagtgctgggattacaggcgtgagccaccgcgcccagccttttttttttttttttttttttttttgagatagagtcttgctctgtcgcccaggctggagtgcagtggcgggatctcagctcactgcaagctccgcctcccaggttcacgccattctcctgcctcagcctcccgagtagctgggactacaggcacccaccaccacacctggctaatgttttgtatttttagtagagacgaggtttcaccgtgttagccaggatggtctcgatctcctgacctcgtaatccgcccgcctcggcctcccaaagtgctgggattacacgcgtaagccatggcgcccagcccatgtggccatttttcagtgagagaagccagaggcccatcactctcggttgctccctgggccatgctctgcctcagccagaagcactgagggaaggtcagcctcggcccttgccccagccacagtcacagataaaggggcctgcacaggtctgtgtggctccagagctcgtcacccaacacacgacgcttccatgtgaatagccccaggtgcatcatgaagagcgatggccgctgcagaggcagaagaatcccgcggggaagcaggtgggagagaggctgagaacagaccagaccctggagctacagaccctatgttccaaccctggctgggactagctgtgtggctctgggcaaattcacatgcttctctgtgcacaggggatcaaaatagcaaacacaggctaggcacagtggttcacacctataatcccagtgctttgagaggccgaggtggacacatggcttaagctcaggagtttgagaccagcctgggcaacatggtgaaacctcgtctctacaaaaaaaataccaaataaattagccaggcgtggtggtacgtgcctgtggtctcagctacttggaaggctgaggcgggaggaacacttgagcccaagaagtcaaggctgtggccgcgtgtggtggctcacgcctgtaatcccagcactttgagaggctcaggtgggtggatcacttgtgatcaggagttcaagaccagcctggccaacatggtgaaaccccgtccctactaaaaaaatacaacaatttgccaggcgtggtggcgggcacctgtaatcccagctacttgggaggctgaggcaggagaatagttagaacttgggaggtggaggttgtagttagccaagatggtgccgctgcactccagccagggggacagagcaagactccatcccaaaaaaaaaaaaaacaaacaaacaaacaaaaaaagaggtcaaggctgcagtgaaccatgattgtgccaatgcactccagcctgggtgacaaagtgagaccctgcctcaaaacaataaaaatataaataaaaataaaacataatagcaaacgtttcatagaggtggtatgagcattaaatgaactgataaacgtccctggaaaacagtaagtgctatggaaggattcgctgccgccaccgccaccaccattagcatgtttcaacctccatcaccctcactgtcccctgtcaccatcctttgaccagggcactcccagctgcagcctttctatcctcttgtccacccttcataactgtaagatcactcagctcccaagaaccacagtctacagggtaaccacatttccaaatctcaaaccagacccgctggtctgcacttccagggacaacaggatattttcaaaccagcccaaaagagatgtgtggctcagcataagaggaacaggagaaactgaggcctcttgccctgagaatgagcttggaagtggatgtcccggcctcactcaaaccttcagatgactgaggcccagccaggagcttgagtgtaccctcaggtcataccctgagccagaagcacccagctaatccactcctcatcactgactccctccccataaaaaacctgtttgctgtttcaggctgttaagttgtgggctgttttgttacacagcaatggataactaacacacgaggcctggcaagtgtggagcaaagctgcccaagccctcaagtctgttcatgtgggtgttggcctgtgtttgcagaaatccagccactgagtcctcccatgcagtcactactgccctctgcacagacacctgccacatccctgcctgggccaggagctccactagtgcaggaatggggtctgccgtcccaggaggatccctgacacctagcacagggctagcagcaggcagcacttggttagtgaataaactgcccttcacctgtacacagaagggatgtttctataaggggtaattaagtacagagctgggaagctatgctgaccagaaggctctaaaagcaattaaccaacgaggggaaaacccttcctactcattctcggcccattttattgagcactgaccatgtggaaggccccctggtgagactggggaatgcaccaataactgagacagcttccggctgttgccctcaggatgcctgagctgggatagggccagggtgggggtggtgcgtgtgacagggttactgttcacaaccctgccgggccataagccctccccaacaattccaaaatccaaaacgctctgaagatggaaagcttttgttgctcatctggtgacaaaacctcatttggtgcatgggccgggtgcggtggctcacgcctgtaatcccagcactctgggagccgaggggaaggatcccttgagcttaggagtttgagaccagcctgagcaacatgtgagaccccgtctctaccaaaaatacaaaaattagccaggtgtggtggcgcactcctgtagtcccagctactcgggaggctgaggcgggaggatcgcttgagcctgggaggtgggggctgcagtgagctgagattatgacattgcactccagcctgggtgaaagagtgagactctgtctcaaaaaaacaaagttaaaaaaaaaaaaactgtgcatgggtgtgggctacagatagtcttttctgccctacttagaatgaacgtgccacatttgctatagaaatattcaagggctggtggcaaatgccacacagaccctgacgctgttccaagttctgagaagtcctgcattcctcagggccccagagtttcagagaagagtctgtaggcctgagttaagaaggaacgccttcaaaagccctggggacaaaggggaaaggggtgccccaggactgcgtgggtacctaccggaacgagccgtccaggttggcacggtggatgaagctgagcttggcgtcagcccagtagagcttctgctcctccaggtcgatggtcagtccattgggccagtaaatgtccgagtccacaatgatcttccgggtgctgccatccatccctgcccgctcaatccggggcgtctcaccccagtctgtccagtacatgtacctgtgacgggggcagggcaagagaagcagctaacacagatctgttttttgtttttgtctgcatagatgcagacatgaaacaacagacagtgaacttgccctaaaatctcacccatcggaaataaccaacaggtatggtttcaggtattcctgccttaagctgggcaatcaaaatatactatttccaacttgttctcagttaacagtaaattctgggcaccttcccttcttgtggatagaaagattccttgttcttttgatgattgcctagtgtactctgctgtaagttttttaaagaacttcaggttatttctgatttttttgctaccatgaaaatgctgtaaatgaacctctaaaaggcaattcaaaacactcaggatggaatattatttagtggtataaagaaatgagctatcggctgggcccagtggctcacacctctaatcccagcactttgggaggccaaggcgggtggatcacgaggtcgggagatcaagaccatcctggctaacacagtgaaaccccgtccctactaaaaatacaaaacattagccaggcgtggtagtgagcacctgtagtcccagctacttaggaggctgaggcaggagaatcatttgaacccgggagggggaggttgcagtgagcagaaatcgcaccattgcactccatcctgggcgacagagcgagactccatctcaaaaaaaaaaaaaagaaaagaaaagaaatgatctatcaagccatgaaaagacatggaggaaacttaaatgcatgttagtaggtgaaagagccaatctgtatgagtccagttctaaacactctggaaaaagcaaatacacagagacagtaaagcatcagtggttgccaggagttggagaggagagggatgaatgagtggagcacagaaaatcagggcagtggaactatcctgtatgacatggaatggtgggtgcatgtccttactcatctgtctaaaccaagaatgtacaaatcaagggcgaaccctcgtgtaaacgtggattttgggtgatggtgcgtcagccagctttcatcagttgtaacaaatgtaccaccctgcacaggatgctgacagttgggaaggctgtgtgggtgtgaggacagggatgtataggaactcagtacctgctgctcatcaattttgctgtgaacctacaactgtttgaaaaaattaagtctatttaaaaacaacaaaacatggccaggcacgatggcttgcacctgtaattccagtacttcgggaggctgaggtgggtgggtcacttgagccaccctgggcaacatggcaaaatcccacctctacaaaaaataaaaattaaaaaaaagttagctgggcatggtggcacactcttgtagtcccagctacttgggaggctgacgtgggaggatcccttcagccctgggaggtcgaggctgcagtgagctgtgactgtaccactgcactccagcctggatgacagagtgagaccctgcctaaaaaaaaaaaaaaaaaggctgggtgcggtggctcatgcctgtaattccagcgctttgggaggccgagatgggcggatcacgaggtcaggagatcgagaccatcctggctaacacggtgaaaccccgtctctactaaaagtacaaaaaaaaaaattagccgggcatggtggcggacacctgtagtcacagctactcgggaggctgaggcaggagaatggcgtgaacccgggaggcggagcttgcagtgagccaagatcacaccactgcactctcagcctgggagacagcaacactccgtctcaaaaaaaaaagaataaaacccatggctgggatggaccctgaacctgcagctgcagctgttcctgggtaggtctgtgggcgacgtggctttgcttctccatgttcccaagagacaagcatcacccatccatgagaaacaagcacatcctcagggcgcccttacgtgatctctggccaatgaaccaagacaaagtgagcagacaccaggtctgggatggcaggtcccacccccaccagtgcccagtgtgccctgtttggaggtgaccacagggtgtgtgcccagaggctgggcgtgactctcagcggagaccagaggggaaccacaccagcttggaggactcagttcccatcccagccagctgggatgagccacaggacacaagggctggcagacctattgtgttttgtccacccttcacagcagagaaaggggacagtgcccagaatgtcctctgaggagcctcctcccactcttggtccttgtaaaatggtgctgactcccttgctcccttcttcctggggtgggcggcaaaccccattcccctcagccttagcaagtgatttagaaacaggcagctcgcccaagccaggcatgagagtgatcccgggacacagggagaacaagccccgctttgccctctgggggtctccattcagcagaagaggcaaatgacagacacacagccgcctcctcccccaccatggtgctctgcagcctcaggagcctcaggtgcaccaagggccaccccatccagggggccatgcttccttgagtggtatcgttcctgagcgagtaccatctccaccttccagaggggctgtgacaagatcaacaagaatgagggcataggagcctcgaaccaaacatgccctcttccctgcagaggctgactgcgcccagctgctatcaccaagcccctgctcctccggccccgtggggacagggtaagaggggtgtcacatggaacagctctccaaacagtccctctcaagctgctgtctcctgtgcatctagtgagaacccaaccaacaaagggaaggtgggaattgctattcccattaggcagatgagaaaactgaggccccgaaaggctggcctgttccaggttacaggcgctgagcggctgctctgggaacacacttggtgtctgctgagggcccgagcccggccatcatatgactcacccttcgccagcaaagcccgggtgtgggtgaacttttcctggcagcctgggactccaaggtgctggcagccagcccagggaaggctcccgcgtgcctgcggcagacgccttgctttacctgcacgtccccacccctaggagcctggacagagcccagaccctccgccacctcctgagaaggtatcaggggcatcagtctggacttgggggggaatccacacaggccttccccaaatgctccaccgtggcccatggaaaaggctggaaaacgtgcaggagcaggagcctccgcatggagcataattcacattccttccccgagtttcataacagaggcctgctggtttccttaaatggggaatttgcgagccagtcggtgaccagagactggttggcgtggacgtgctcttgcagagtctcaaacgctaccacaagcccagccaaattccacggaggaaaatcgacttccgaagaaaagagctgcagcatggccttcgtgcagagccagctgcggttgtggttgtgtgttattttagggaagggccattttgcattttaaagagggggttgggtttcaccctggctttaatttgagacccgggggccactgcagccccttgtcaggctggtacaggccggggactcctcccatgctaagccagtgtctttctggccccagatcctcaggggccagagggtcatccccagagcccgctctgccacccacatgggtaccctgggcctgggagggatgtgccttccctcaaccctgcctggatgtccgcacggggccacctgcattgctgaaactgcaacgaagtcgagtctcaggaggggcccccctggctgcagggctcttgatccttttggccacgtgcacactgaggtggacgctcggacccagagacccccttcatgatgatggccggggcaggaaccccctcctctgaggaaggaccctggtgggggacagcactgcaggagggcacaggagatgacgggggctctagcagggccgggaggaaggccaagatgctcctcgcaaccgtgtgcctgtggccaggacagaggacaaacccaccctccactgtccccactctcaggacagcagtcctgccccaggactcagcgcccacacttatgcctgaggaccactattcaagtcagtatttggcgagcaggggttgctgccgcgggcgctgtgacaggctggaatcctctccctctccctctccctctccggagacatggagcctacagggacagagtcagcacctcagggtaggaccatggctggcgtcatcagcatcactggatctgatgagtgggagccggcatctcactgttttcactctctcattcaaatgactggagcaaagggaaggtgtggggagaggcccaggaatcaacactaaggtcaactttgcccccaggggcaggggtgggagtgaacagccacaggtgtgatcctggggagggcttctgggagagaattcagaggcaagcatgtagaggaaccatttcaaatagttaagaaaagccagagccaaacagggacagttggctcgcagagatgatgcaggcaaagccagctcagatctgagcatgggaaagactactcccaaccaagggcccagcatctcccaaccaagcaccaagtacctcccaaccaaatgccaagcacctcccaatcaaatacctcccaaccaagcacctagcacctctcaactggacaccaactactcccaaccaggcaccaagtacctcccaaccaagtgccaagcacctcccaaccaagtaccaattacctcccaaccaagcgcctagcacctcccaactgagcatcatgcacctcccaacagagcatctagcacctcccaactgatcacctcccaacctagcaccgagcacctcccaaccaagtgcagagcacctcccaaccaagtgccaagcacctcccaatcaaatacctcccaaccaagcacctagcacctctcaactggacaccaacaactcccaaccaagcgccaagcacctcctaacaaagtaccaatcaccttccaaccgagcacctagcacctcccaactgagcatcatgcacctcccaacaaatcacctagcacctcccgactgatcacctcccaacctagcactgagcacttcccaaccaacatagcaaaagccataaagaagtaaaaagacaaaaccacgtaggcatggagactggacttctggtggcgaggaaagggcatttttattataacgacagctaacatttgttgaactcacaaactgttcttggtgttttcctcatgacatgcagcatggtcacgcctctgtacagacaaggatactgaggcacagagtggcaccgtgccaaccttgtctcatctttttatcgaacctacatgcagagtgccagcaaatccagctgtcttttctcttcagaacagatcccaaatctcgccactccttacccccacaagtgaggtgtccccgctgctgctttctgtcgccaggatcccggtaataaccgtggagagggctcctgcccccacgccacccaccccacagctcactctcgctccagccaccaggggatgccttccagcacgagtcagagctggcacctcctctgctcgagacctcatgtgtcctctcctcacaccttgggccctgtttccctacattctgctacagcccctcaaacaggccccgccccaaaccagcccagggcctttgcactggctgatccctctgcctggaccgcgctgcccccagacagccacacggttctcagcctcatctgcttccagtctcgactcaaaagtcaccaagaggccttcccagcacctgagctccgacggaagcccctcgccacagcacccaagcactgctttatccccctacgcacacgtccctttcaaatactattcatttaccatctcctcccactcactgaaagggccagagactgggctatacccgctgcgtggggagcaggaccaggcgcaagggctcacaaatgcagtggatgcctggttgggaggtgagggagctgcagcgacccacgctgggagggaacgcaatgacaggaggagcgcaggtcctggcgacacgatggccatggcagccgctggtgagcaaccgcaggccggccctgggagagggcttctagcaagctgctatcttcagcctctccgactactgcagatgccccctcctagccagagacactgctacaccagccgacccttccaaaaagaaggtcagtaaccccgcgactcctggagccacagtgcagggggagagggctgagagggcaacagttcaccaagcggaacagaggctgccccggaggtcagctggctccccggcagctgcaggggtggctagcccactcggagggcagcgagggcatacgaggggctccagggatgagtggttgcccagcacagcacccctgggaggccgggggcacttctcaggtagtgggggcacgaggctgctctggcctgacctcagggactcaaaatactttggcgataaattccaccgtgtcccacccctgctggtaccccatacttacacacagactggttcagatgcagacactctcgcgcacatactcgctcacacgggcacatacacgtgcacacacagtcacatgcgcacactcatacacacacaaatatccactcacacgcatgcatgcacacacacggacacacacaggctcacacgtatgcacgcatatgcgtgcacacgcacacacacacacacacgctcacatcctcccactcccacactcagttgctcagacacacacacgcctggctctcacacaaacctgttgggctctgaaaggctccagcccttcccatgctcgtcagaagccagtcaatggcttcctaagtcaccacacagatcaaagaggtgaacttggccacatggcactctgcttcctgagctcccaaacaccagccttggtgaggacagaccctcaccccacaccctcattcccactaccctgggcaggcccagaggaggggcatctgcaggatctggcaaccagcccctcccgcccggctcctgcagccggcaccatgggagtcagggggaggtcactgcaaagggcaacagcaagttggtggccccaggactagagcccaggggtcttcagtcctactccagagcttggacactgtcccacagggcatggccaagggaagggcttccagagccctgacttcagggaggagggcaggcgggctcctgtggcaggcctggatgcatggccgcccactcctgggactttctaacctagaatatctaggtcaggctgggtgcagtggctcacgcctgcaatcccaacactttgggaggccgaggagggtggatcacttgaggttaggagtttgagaccagcctggccaacatggcgaaaccctgtgtctactaaaaatacaaaacctagccaggtgtggtagtgcacgcctgtaatcacagctactcaggaggctgaggcaggagaatcacttgaactcgggaggtggaggttgcagtgagctgagatcgtgccattgcgcaaagaagatctaggccggcccctcaaccggtgaggtccaggctgggagtgctgagagactgtggtgacactgaatgaactaacaggcaaagggcttccaactgagcctgggggtggtgggaaatggctcttgtgttctagtcaagacctctgccaaccagttctgacactgacccagcacagaacctgacaggtcagcaagggccagggcttagcacagcccaggtaagggtgtgtgtacggcccccagagtcactcccaggctgcaagaaaagggacaaaggagggacaaggggtggccaagcaaactgttccctctgctcgggagtctggggtgacctggcctagctggccagtggagctgggccacctccccttaaactctccaccccggacttcgactccaaagctttcctgccacccacgctctccccacctgggatcacggccaggccctgagccttcaagggcccaggtgaactcagccagactaggagctgaggaggacacagggcagcttccagaacggacccgagaaccactcccagcaggttctgcttccagacaaggagctgcactttttcagccaatgcaattagaaagccaggagaaggtgcaaattccacctgcctgagcgtccgcacttcccaggccgcccaccatacacacagcaaagatgtgtttaaccattcaaacccatggccaaccacatcggttgcctcagacatgcaagttttaaaaaggaacataactatgggccaggcacggtggttcacgtctgtaatcccagcactttgggaggccgaggtgggtggatcacctgaggtcaggagttcgagaccagcctagacaccatggtgaaaccccatctgtaccaaaactacaaaaattagctgggcgtggtggtgggcgcctgtaatcccagctacttgggaagctgaggcaggagaatcacttgaacccgggaggcgaaggttgcagtgagccgagattgtgccactgcactccagcctgggcaacaagggagactccatctcaattaaaaaaaaaaaaaaaaaaaaggaacataactatggagtctcaaggggaagtaattccttcaacaataacaaatcttgaaagctgagctcttttttttttttgagacaggatctcctcactttgtcgcccaggctggagtgcagtggtgggatcacagctcactgcagcctcgatctcccaggctcaaatgatcctcctacctcagcctcccaagaagctgggattacaggtgcataccatcacacccgattcatttttgtatactttgaagagatggggtctcaccatgttgcccagtgtggtcttgaattcctggactcaggtgatctgcccgccttggcctcccagagtgctgggattacaggcctgagccaacacccccacgggttcattttcagagtcgcaccgagtgctggggttacaggcctgagccaacccccccacgggttcattttaagagtgacaccgagtgctggggttacaggcctgaaccaacccccccacgagttcattttcagagtcgcaccgagtgctggggttacaggcctgagccaacccccccacgggttcattttaagagtgacaccgagtgctggggttacaggcctgagccaacacccccacgggttcattttcagagtcacaccgagtgctggggttacaggcctgagccaacccccccacgggttcattttcagagtcacaccctttttctgaaaaacaacttgggctcatgcaaattcgagagagagatggtgacactccccgccccctggacccaggtggagtcgcagcagggtttacccgtgagcggggtccaaggcgatggccctcggctggtcaaggtcctgccagaagagcaccttccgggatgtgccattgaggttggccacctcgatgcggttggtctctgagtccgtccagtacagcttcttgcccacccagtcgcaggcgaggccgtcgggagagaccaggccggagatgaccacgttctgcacggcggcccccgtctggttcaggtaggtctgcttgatggcctcctcgctcacgtctgtccagtacacggctcccttggaaaactggaagtccactgcggccgcatcctccaggccgctgaccacgatggtggactccagcttgactccgccggcgtccaccagccgtacgtcccggcggttggcaaatagcaggagcggcgaggctgtggggcagaagcaaaccgtgagggccactggctaagccagcaagatacacagccctgggatggagcactatgcccagagcactcctggtactgccctgcccatgcccaagacctccagttccttcctcccacccctaaggcgttgtcaggaagttgcctgggcagccccggcccgcatcattcagaggctcctgcagcgcagcaaacagccttcttcccacattcggtgacagcacctgtttgtttaccaactgttacgtctgttcccccagatatgggtgacccttcctgccatgcccaaaacctcccacatcgtcctccagaggctacaggggccctgtcctgttctgcagagaagccacatcccctttgttggcctgacacaggggatggggacatgcaggcacagcactggccatgctgctcgctacagacccagccacagggccacattttttgaggggttcagagcccaggccagacagagcctcaagattcccttacaagtctttgaccactgtccaagctcaggcccgtttccttggccgtggcatcagcttcccatccacccctgtattccatgtttctcccaccctgcttctggacattcctacatttaaagggtcactctggaatgccaccccttggctcagacaccttccacagctccctgtgccagtgccatgcagaacaaggtcagaccccctagcctggcctccaaggccttggcctctggcctcacctacacttctctccaccaccccaccccaagcattcctgatctgcctgcggccaggctggctccctcacctccctgtgcaccgcagccctcagccccttctgcctgtgcaagaagcctcatctcacagacaacggtctcattcccacaacgggctcaatgagaaatcaggagaggccttcagaccatcaccccaccagacacctcagacgtcggaccaggagggtccagcaacccccaacacagactcagagggactaagaagccacatgaggagtgaacacaagatgtggacaggaggaggttaagggcctccagggagctccatcagtccgtgttctgctgtcagcagggttaggctgggctggccacaaacacccccaaaaaacatctgaagccttggcttgaaacagctgacattcctcatgaaaactgcagacccctgggtcctcctgcgcagatgggggagcccagccaaccccacactcccaccttcaccaagaaagagaaagccaaaacaaactcaactcagccaatgacaatcacagaactgaatcctgtagttagttcagttggtttcatttcagcaggggaaagatttgcagcctctatgagggtagctgggaacacaaagggccagagcatggcccaggagaccccagcgcagtggggtagatggttccgagcacaggcctccctgccaagacaagcactggctcaaatcctggcccctcccattcccaggagacatgctccacaggatgggaggacacacagaggacctgaggccaggaaaatgacagcggcgcctccgccgccccacccgtgctgtcatcatcttaggtctacagttctttgtggcaacgagggacactgtgaaagtcaaacaacaggaaggcataggccacaaataaagacaaacgggacttcatgggaagctaaagattttgtgcatcaaaagacactatcgagagagtaaaaaggcaacccacagaatgagagaaaatatttccaaatcatagatctactaagagattaatatccatgaaatacagagaactcctaaaactcaacaatgagaaaacaactaagccaactcaaaaatgggcaaacaacttgaacagacatttctccaaagatgacatataaatggccaataaacacatcaaaacaggcttaatatatccctaatcatcagggaaatgcaaatcaaaactacaataagataccatcttgcaccaattaggacggctactatcaaaaaaacaaaatagcaagtgttggtgaggatctggagcaactggaacccttgtgcaccactggcaaaaatgtgaaatggtgcagctactatggaaaacagcatggcagttccccaaaaacttaaacacagaattaccatatgacccagcaatttcgctttgggttatatacccaaaagaactgaaaacagggacacaatcagatatgcatacaccttggatcacagcagcatccttcccaacagctaaaacatggaggcagccaggcatggtggctcacgcctgtaatcccagcactttgggaggctgaggcgggtggatcacctgaggtcaggagttcgagaccagcctggccaacatggtgaaaccccgtctctactaaaatacaaaaattagctgggcgtagtgacgggcacctgtaatcccagctactcacaagtctgaggcaggagaatcacttgaaccctggaagtggacgttgcagtgagccaagattgcgccactgcattccagcctgggtgacacagcgagactctgtctcaaaaaacagcaaaacaaaaacaaaaaaacaaacaaacatggaagcaacccaagcgtccctctactgagggatgaatagcggggcaaaatctgctccatccacacaatggagtactattcagtctcaaaaaggaaaaagattctggtcaggcacggtggctcatgcctgtaatcccagcacttggggaggctgaggcgggtggatcacctgaagtcaggaattcaaggcccgcctggccaagactggcaccnagctacacanaaagtatanggccccggaaa

SEQ ID NO: 9 - DNA, 72049 bp, Homo sapiens
  misc_feature (8356),(8385),(38585): n = A,T,C or G
tataccttgcgcggaccttcggctcctgtggtgaagacaatatgaagaaaatagaaattacccataattttgccacacagacttagttgtgtccatgtatcttgtgcaccttttttctgtttacggatcaaaatcgacttttagggtcaggcgcggtggctcacacctgtaatcccaacactttgggaggctggagttggggttggggggtggatcactgaagatcaggagtttgagaccagcctggccaacatggcgaaactccatctctactaaaaataaaagattagccaggcgtggtggtgggtgcctctaatcccagctactccggaggctgaggcaggagaatcgcttgaacccaggagacagaggttgcagtgagccaggatcacgccactgcactccagcctggcaacagagcgagactctgtctcaaaaaaaaaaataaaaataaaataaataaatacataaattgacttttaggagattggttcaaacaatgtgtgtaatgttgtgtctgagtgtttttcatttatcgttcatgcaaattccgacatcattcactcttctccagagtgtgctgttttcctgcctgtgtcatcacccgtcaccttgaatgccctcgtttaggtaaaataagtacattttattcaaaaatatttgaggacatttgggttgtctccaggttcttggtcttgagttttgctgttcttgtggagccatggtggtgtctggttgcaggaacctccatgcgttccagctgctgcttctgcctgtgttcttagagaggaaatgctggggtccgcggttcccgggctgctgaccaggaagcctgcggtgctttacggcccttccagaagcgggagatgcccccacttaagtgtcagacaggcctttccacctcactggcagctctgagcggctcccttctatttgcagatgactgagaagttaccaatttccacgtttactgactgctgtttctcctgttaatttgtatttatagtcttcgctaatttattgctagggttttggtgttgtccctattgacttgtatgccttttaattttttaaacaacattaatatacttcatttttttagagcagttttaagtttacaggaaaattaagggacaagtacagagagttccttccacctgctgtcctcctctcctcctccccaccttccctccttcccctattgtaactttctttctgatattataaaagtcactcatggctgggcgtggtggctcacgcctgtaatcccagcacgttgggaggcagaggcaggcagatcacctgaggtcaggagttccagaccagcctggccaacatggtgaaaccccgtctctactaaaaacacaaaaagttagccaggcgtggtggcgggcacctgtaatcccagctactcaggaggctgaggcaggagaatggcgtgaacctgggaggcagaggttacagtgagtcgagatcgcgccactgcactccagcctgggcaataagagtgaagcttcgtctcaaaaacaaagtcacacacgcttcttgtacgagggtcatttggccgaggggccagatggctcaccatctagttgggacaggccatgagctcggaatgctttttacatatttacatggttgagaagaaaatcaggagaataatgttttgggacatgggaaaatgacatggaatttgcattttagtgtccataaatgaagttttgtttgctcccagctgtgttgactgaggcaggctggcttcctacagctgcggcagagctgaggaggcgggaaggagaccgtgcaggccgcagcaccgaaaatatttgctctctggcccttcccagagtgcttgccgacctctgtccgacagctagaaggaaggataggacccgtccgacgataaccactgttgacatttgagcgcgtttccttcccggcttttgtgtgagagtggcagtctgtttgcttttgtggtcgggatctgctgcacgcacggcgggctgtttgcatgaggcttcctggaggatagggctgggctcggagctgcacgcagtggggcgtgtcctgcatgcagtggggcctcagaagagagctgtggtgggcggggcagtgccaacgctggtgggtgccaggcctccacgctcagatcagccccggcgacaggtttgggccaccctctctctggcctctgtgcagtggcccaggccgtctgctctgcctggcacacttgcctctgtccttccactgaagcgctcctcttaccctctgctcccggctgggtacgttgaattgtgtccctcaaggagatatgctaaaggtctaaccccaggaacctgtgtatgtgatctaatttggaaacagggtcttggctgatgtaatcaagcgaggatgaggtcaccctagagtagggggcctatatccacggtgctggtgtcctcatgagagcaggtgagcagacactgacactcaggggtgaaggctgcatggagtcagaacagggcttagtgcgatggcggccacaagccaaggaactccaagtatttcctgcaacaccagaagctggaagatgccaggaaggatcctgccctggagccttcggagggagtctgtccctgcagacgtcttgacttttgattgcagggatgcatgtcttagggtgtgtgggggggtgcatttctgatgttagaagccacctggttggtggcgatgtgtcacgggagccctctgcaggttctgcgtgtccatgtggtcggggacagaggtgggcagggacggacggtgtcgagctggacatgtccatgacgtcggccatcccttgggatggcttttttgttttgaggataaggctgcctgccaggaagctgtgccctgcctggcccttgccccaagcccctggcctgtgcttggcctcgcggaagggatgtcgcccttctctcctgcatgcgtgcagggaggaaggggagaggtcagcagcccgcctggaggaggctcgggcgaggggaaggtttcactttcaggcaatgttgtggggctgtttaaacaaccccaaagaaaaccatttggccaaactgttagtttccaaacattttacttccttggtgtttaaataaattcctaccaagactctgtagctggtcccagggaaggagttggcctctcttctttatagcccggcacagtcagtcccctgcacctgcccctcccaaccccaggcctgcttccccgtggccatggctgctgcccggacctctctacacacagaacctcctggaggccagctgtgggcaccagccttggcagggctgtggcggagcccaggctgctggtactctctctgcagctgctccctgctggcctggctggacagcgtccccaccaccactggggtcacctctgtgctggtcacagctcactcagaccttcaggcaaatgggttggatcctgcctctctcccaggtgtctcagtctctgcaaaactcaaaaacctcagaggccttgcagcctgaggggtgtcagagacacctccttcgaatcagtaaacacctacagattcaccccagcagtgaaaggactgcttcgccacagaggtttgatttactcctaagtaattggaagggatgccgagaataggttcctcatggtgggactagaggccctctgctgacctagttaacagagggctagggctgggtgtgctcagcccctgaaggttctaggcccatttgggacaccccgccagaacctgccacaacctgccatgtggtgacagctacctaaatcccagaggctcttgagctggagagcagacctctcaatctcagcaggccccccacacagaccccataaccctagtctgccttcacagtacagttcgtggctatgtgttcacggatggtgttgttcacctaaggtctctgccctgtgaccccaagggcgtcctgagggcagattccaagtctgtttcgtccacccctccttccctagcagcgggtccagggcctggcctgaactagcttcccacagagatactggtgggatgatgaaggcagccaggcggcaagtgaaaaacgcacttcctgcatgtgctggctcctgggattgaagtgtttgaggaagcaaagtgaagtgagctttcctcttgcggctgtgtgtccttgggccgggagcctaccctctctgagcgttggggtccttgtcagtagaatggggcatcctcatagctcaaggggtggtgtgtgaaaattgtgctattgtgttactttaatgattttttttttttcgagacaaagtctcaccccaacgcgcaggctggagtgcagtggcgcgatctcagctcattgcaacctctgcctcctgggttcaagtgattctcctgcctcagcctcccaagtagctggaattacaggagtgcgccaccaggcccggcatatttttctatttttagtagagagggggttttaccatgttggctaggctggtcttgaactcctgacctcaggtgatccacctgcctcggcctcccaaagtgctgggattacaagcatgagccaccgcgcccggcctactttagtgatttcttaggaggacagagggaacgggctggcaagacaggcttggaatgtgttttgggatcaagtgccggtttctgtctggcactggcgttctctgtggggccatgatggacacactgctgaggtcaagcgtgattcgtcttgcgctgtgcctggcagtctcattggaaagttctgtagacatcgtgtggatggggctcttcccggccaagcccttggggaccttccaggactgtgatctccccacagtggctgttaagcagggacctttcgtgaagtggagtctctggtcccctccaagtcatagctagacagggactcgggcatcgccaagcctggctgattattcactggatgaggagacaggcccagagaggggcaggaacctgcccgaggtcacccagcaggccccagaggtttcggtctcggattctccctgctcatccctggatgtagtgctgctgtggatgtggttctgtgctgggggctgtggagagcagggggcttgtgccaggaccccagtgagggtggcgccctcgccatgaggccgactgttggtatggggcggccatccactggggtgtggggaggaacagctttcctgaggaggaggtggcgggaggaacagcttccctgaggaggaggtggcggtgctgtgtgacctgggccttgaaggacaggtccattgtcaacagaacattttgggagtggagcctagagggagaaaatttgttgaaattcagattcccctccccctaccaatacacaccaaatcagatgcccctgaccagatctaaatttggctctcagagatttccattgtagctgggcacttggggaaccttctaagtgctgcctctgcctctccccagcctgcctgcctcagtttccccagccctgggcccgtgtcgctgttgccatcacgtgggcgccctctagtggaggaatcagattatgcactccggggcttggagcaggagtcaggaggggctcctgtctttccttgaaacgttggatgccgggatcctggaacagtctctgcattcctcctggcgagaaccagagcctgggcacaggggaccatctgttgtttgaaggctgcagcctggcagggcactcaggagatctggcagttggctgcagggccaggtctaggggccagggcatcagggaggctctgggctggttcagccccgggcccctttgcagattgtgacctgggcccctgtgcaggggcatggccacaggatgctgggaggggtctctgaccctgaccttcttggctctgtgcatccttgagaccagaaaggtctggaacaaatgagtagacgatgccctaacctggggagggagccacatcctgatcccagcaacctcgggaaggatctgtcaggattatggggcaccctgggggccccaagtctgcatgggtctccacttgcaatttctgtaggaagctctgataaatccaaactgggggtcctaggacacagtcagaaatgctgataccgttgtgtgtggagcctcgggccctgggggtcaggagcatgtggagggtgggccacgggggttcagaagagaatcctgtaaccccccaccccccaaactgaagcccacttgagggccatggctgaaaggttggggggtctccgtgcgtcctgtggagtgggtggtgaggagtccttgggtttgcacgcctctgggcctgagcggcgggaccccgtccacagcggatccctgggccctgttgctcagatgctctcagagtgttgctgtggccacggagggagcctgagttaagcttctcttgtgccggttgtacgctgtcaggtcacactggtgagttaggcagggcacagatgcccagagcagagggaactttccttggggattcaacacgtgcaagtcttaggggctggcaaatcctgccctcagctagagagggggcttttatttgagaccagaatcacctgagcatcctcctgtccccagctgtgtccagcctgtctgcagggacatcctgagaggaccaggctctcccctcatccacctgcctaagtgccactctgaaccctgtccacctgtgccgtggaggggcgtgacctcaagctgctcagccagcagcaggcttggccctggggggcagcagagacccaggtggctgtggggtgggtgcttcgtggcgtggttctgaaacttcgttggaagtgtgtggacagtgccttgcctgttctctgtgggaccctatttagaaacgaggtctgagttactgggggtcatcactgtgttctgatggcccagctgtgtggaggccgcggtgcagccccatccaaggagccagggccctgggtctagccgtgaccagaatgcatgccccggaggtgtttctcatctcgcacctgtgttgcctggtgtgtcaagtggtcgtgaaactctgtgttagctcttggtgttcctgaaagtgcccccgggtctcaggcctcagaaccagggtttcccttcatctcggtggcctgggagcatctgggcagttgagcaaagagggcgattcacttgaaggatgtgtctggccctgcctaggagccccccggcacggtgctggggcctgaagctgccctcgggtggtggagaggagggagcgatgaagtggcgtcgagctgggcaggaagggtgagcccctgcaaggtgggcatgctggggacgctgagcagcatggccagcagctgggtctgcagcctggtacccggcgggacttgtggttggggctggtttgtggccaggagaggggctggcaggagacaagggggactgtgaggcagctcccacccagcagctgaagcccaatggcctggctgtgtggctctcagctgcgtgcataacctctcagtgcttcagttctctcatttgtaaaatgaggaaacaaacagtgccagcctcccagaggtgtcatgaggatgaacgagtgaccatgtagcatgggctgggtgcgtgtcacctaacatcaccagcctttgcaaggagagccctgggggcctggctgagtatttcccttgcccggcccaccccaggcctagacttgtgcctgctgcaggcccttgacccctgaccccattgcacctgtctccacaggagccgaggaggtgctgctgctggcccggcggacggacctacggaggatctcgctggacacgccggacttcaccgacatcgtgctgcaggtggacgacatccggcacgccattgccatcgactacgacccgctagagggctatgtctactggacagatgacgaggtgcgggccatccgcagggcgtacctggacgggtctggggcgcagacgctggtcaacaccgagatcaacgaccccgatggcatcgcggtcgactgggtggcccgaaacctctactggaccgacacgggcacggaccgcatcgaggtgacgcgcctcaacggcacctcccgcaagatcctggtgtcggaggacctggacgagccccgagccatcgcactgcaccccgtgatggggtaagacgggcgggggctggggcctggagccagggccaggccaagcacaggcgagagggagattgacctggacctgtcattctgggacactgtcttgcatcagaacccggaggagggcttgttaaaacaccggcagctgggccccacccccagagcggtgattcaggagctccagggcggggctgaagacttgggtttctaacaagcaccccagtggtccggtgctgctgctgggtccatgcgtagaaagccctgnaaactggagggagccctttgtccccctgncttcagtttcctcatctgtagaatggaacggtccatctgggtgatttccaggatgacagtagtgacagtaagggcagcctctgtgacactgaccacagtacaggccaggcctctttttttctttttttttttgagatggagtctcactctgtcgcccaggctggagtgcagtggtgtgatctcagctcactacaacctctgcctcctgggctcaagtgattctcctgcctcagcctcctgagtagctgggattacaggtgcctgccactgtgcttggctaatgtttgtatttttggtagagatggggtttcaccgtcttggccaggctggtcgcaaactcctgacctcaggtgatccacctgcctcagcctcccaaagtgctgggattacaggcatgagccaccacgcccggtcaggccaggcctcttttgaacactttgcacaccatgggtcttttcatccaggggggtaggtacagttgtacagttgaggacactgaagcccagagaggctcagggacttgcccagggtcacacagcaggatgtggcaggtgtggggctgggcctggcagcgtggctccagctttccagcatagaaatctgtgaaagcagatagtttgtcggtcggtaggggagactttctgagacccgccccagcggctcagagggtagtagccaggggccttcctgggggctcataacccagaacactgaatgggaaaaccctgatggaggaggcgcagtggagctgtgggtgccgatgggaagtcccagaggagctgggaggtcagtagcggtgctgccctctgtggagcacttagtgggcaccaggtgtgtttccaggttcatggccctgggacctgaagctcagaaggtgaagtaacttgcccagggcacccgtcgggcagcggcgggcagaggatttgtgggctgtggagcctgtgctcgtggcccagccctgggggttgtgagtgtgctggccggggagcttttcctgcaagtggactggtgtctaggagccagcatgtcaggcagcaggcagcgggagtgcagcaggcagcgggagcacagcaggcagagggcggggctcgagcagccatccgtggaccctggggcacggaggcatgtgggagagggctgctccatggcagtggctgaagggctgggttgtgccccgaggagggtggatgagggtaagaagtggggtccccaggggctttagcaagaggaggcccaggaactggttgccagctacagtgaagggaacacggccctgaggtcaggagcttggtcaagtcactgtctacatgggcctcggtgtcctcatctgtgaaaaaggaagggatggggaagctgactccaaggcccctcctagccctggtttcatgagtctgaggatcccagggacatgggcttggcagtctgacctgtgaggtcgtggggtccagggaggggcaccgagctggaagcgggaggcagaggggctggccggctgggtcagacacagctgaagcagaggctgtgacttggggcctcagaaccttcacccctgagctgccaccccaggatctgggttccctccttggggggccccagggaacaagtcacctgtcctttgcataggggagcccttcagctatgtgcagaaggttctgctctgccccttcctccctctaggtgctcagctcctccagcccactagtcagatgtgaggctgccccagaccctgggcagggtcatttctgtccactgacctttgggatgggagatgagctcttggcccctgagagtccaagggctggtgtggtgaaacccgcacagggtggaagtgggcatccctgtcccaggggagcccccagggactctggtcactgggcttgccgctggcatgctcagtcctccagcacttactgacaccagcatctactgacaccaacatttacaaacaccgacattgaccgacaccgacatttaccgacactgacatttaccaacactgtttaccaacactgacatctactgacactggcatctaccaacactgacatttaccgacactgacatttaccaacactatttaccaacactgacatctactgacattggcatctaccaacaccaacatttaccgacaccaacatttaccaacactgaaatttaccgacaccgacatttaccgacaccgtttaccaacaccgacgtttaccgacaccgacatttaccgacactgatatttaccaacactgacatctactgacgctggcatctactgacaccgatgccagcatctaccaacaccgacatttaccaacactgacatttaccaacactgacatttaccgacattgacatttactgacactgacatctactgacactggcatctactgacactgacgtttaccgacactagcatctactgacactgacatttaccaacaccagcatctaccaacaccgacatttaccaacactgacatttactgacactgatatctactgacactggcatctactgacaccaacatttaccaacaccagcatctaccaacaccgacatttaccaacaccagcatttaccaacaccgatgtttaccaacgccgacgtttaccgacgccagcatctaccaacactgacatttaccgacaccgacatttaccgacactgacatttactgacactgacatctactgatactggcatctaccgacactgatatttaccaacgccagcatctactgacactgatgtttaccaacaccgacatttacgagcaccgacatttactgacaccaatatttactgacatcaacatttagccatgtgatgggggccggcttgggggcaggccttgctcttggcactggggatgctgcagagaccagacagactcatggggtcatggacttctgcttcttctccagcctcatgtactggacagactggggagagaaccctaaaatcgagtgtgccaacttggatgggcaggagcggcgtgtgctggtcaatgcctccctcgggtggcccaacggcctggccctggacctgcaggaggggaagctctactggggagacgccaagacagacaagatcgaggtgaggctcctgtggacatgtttgatccaggaggccaggcccagccaccccctgcagccagatgtacgtattggcgaggcaccgatgggtgcctgtgctctgctatttggccacatggaatgcttgagaaaatagttacaatactttctgacaaaaacgccttgagagggtagcgctatacaacgtcctgtggttacgtaagatgttatcattcggccaggtgcctgtagacacagctacttggagactgaggtgggaggatcgctggagtccaagagtttgaggccagcccgggcaaaggggacacaggaatcctctgcactgcttttgccacttactgtgagatttaaattatttcacaatacaaaattaagacaaaaagttaatcacatatccactgccctgcttaagacagaaaacatgggtgttgttgaagccagaggcagctgctggcctgagtttggtgattggttcctaagcagttgaaggcagttttgtttttccatagatgtctgttctccctttgctgggtgcagcctcgccctgctgctgtggtcgggtttcagtggcctcgtcccgtggacgcagcctcgccctgccgctgtggtcgggtttcagtggcctcgtcccgtggacgcagcctcgccctgccgctgtggtcgggtttcagtggcctcgtcccgtggacgcagcctcgccctgccgctgtggtcgggtttcagtggcctcgtcccgtggacgcagcctcgccctgccgctgtggtcgggtttcagtggcctcgtcctgtggacgcagcctcgccctgccgctgtggtcgggtttcagtggcctcgtcccatgggcgtgctttggcagctttttgctcacctgtggagcctctcttgagcttttttgtttgttgtttgtttttgtttgattttgtttgattgtttgtttttgttgtcgttgttgttgcccaggctggagtgcagtggcgcgatctcagctcactgaaacctctgcctccttgggttcatgccattctcctgcctcagcctcccacatagctgggattacaagtgcccgccaccacgcctggctaaattttgtatttttagtagacagggggtttcaccatgttggtcaggctggtctggaactcctggtctcacatgatccacctgcctcggcctcccaaagtgttgggattacaggcgtgagccaccgcgcccagccctctgttgagcatattttgaggttctcttggtgccagtgatatgtacatgtgtccccatcgcaccatcgtcacccattgaggtgacattggtgcctctcctcggggtggatgcctccctctgtttccagcaacttctgaaggattttcctgagctgcatcagtccttgttgacgtcaccatcggggtcacctttgctctcctcagggctcccaggggaggcccgaatcaggcagcttgcagggcagggcaggatggagaacacgagtgtgtgtctgtgttgcaggatttcagaccctgcttctgagcgggaggagtttcagcaccttcagggtggggaacccagggatgggggaggctgagtggacgcccttcccacgaaaaccctaggagctgcaggtgtggccatttcctgctggagctccttgtaaatgttttgtttttggcaaggcccatgtttgcgggccgctgaggatgatttgccttcacgcatccccgctacccgtgggagcaggtcagggactcgcgtgtctgtggcacaccaggcctgtgacaggcgttgttccatgtactgtctcagcagtggttttcttgagacagggtctcgctcgctcacccaggcgagagtgcagtggcgcaatcacggctcgctgtagcctcaatctccctgggctcaggtgatcctcctgcctcaccctctgagtagctgggactacagacacataccaccacacccagctagtttttgtgtattttttgtggggggagatggggtttcgctgtggtgcccaagctgatctcaaactcctgaggcacaagcgatccacctgcctcggcctcccaaagtgctgggatgacaggcatcagccgtcacacgcagctcaatgattttattgtggtaaaataaacatagcacaaaattgatgattttaaccattttaaagtgaacagttcaggctgggcgtggtggcttatgcttgtaatcccagtactttgagaggctgaggtgggcagatcacctgaggtcaggagtttgagaccagcctggccaacatgatgaaatccagtctctactaaaaatacaaaaattagccgggcatggtggcaggtgcctgtaatcccagctactcgggaggctgaggcaggagaatcgcttgagcccgggaggtggaggttgcagtgatctgagatcatgccactgcactccaatctgtgtgacagagcaagactctgtcttgaaaaataaataaataaaaaaaattttaaaaagtgaacaattcagggcatttagtatgaggacaatgtggtgcaggtatctctgctactatctacttctagaacactttcttctgccctgaaggaaaccccatgcccaccggcactcacgcccattctcccctctctcccagcctctgtcaaccactaatctactttctgtctctgggggttcacttcttctggacgttttgtgtgactggaatcctgcaatatgtggtccctgcgtgtggcttctttccatagcattgtgttttccagattcacccacacattgtcgcacgttatcagaatctcattcctgactgggtgcagtgggttaggcctgtaatcctaacattctgggaggccaaggcgggacgatcacttgaggcaggagtttgagaccagcctggccagcctagcaagaccccagctaccaaaaaattttaaaagttaactgaacgtggtggtggtgggcacttgtggttcccagctacctgggaggctgaggttggaggatcgcttaagcccaggaggtcaaggctgcagtgagctatgatcgcaccactgcactccagcctggacaacagagcaagaccctgtctgaaaaaaaaaacaaaaaaaaaagttcctttctttttgtggctggatgacatcccattgtatggccacagcacattttgtttgtctgtttatcgggtggtgggcagtggtttccaccttttgtctcctgtgaataatgctgctgtgaacatttgaattcaagtttttgtttgaacacctgttgtgaattatttggatatatgtgtaggggtaggattgctgagtcctatggtaatgttaggtttgacttactgaggaaccattaaactgttttcaacagtggctgcgccgttctgcatccccaccggcagtgtgtgagggttctgactttacctcctcacaaacgcttcttttccatttaaaaaaatattcagccaggtgctctggctcacgcctgtaatcccagcactttgggaggccgtggcgggcggatcacctgaggtcaggagttcgagacgagcctggccaacatggtgtaaccccatctctaccaaaaatataaaaattagccgggtgtggcagcgggcgcctgtaatcccagctacttgggaggctgaggcaggagaatcacttgaacccgggaggcagaggttgcagtgagccaagatcgcgccactacactccagcctgggtgacaagagtgaaactccatctaaaataaaacaaaaataaaaataaataaaaatttattaaaacattcatcacagccagcctagtgggtgtcccatgtggctttgcctcgcatttccctgataactaggatgctgagcgtcttgtcccaggcttgccacacctcagcactttgagatacgtcgcacagtccccatttgcgaacgagaaatgaggtttagggaacagcagctgtgtcatgtcacacagcgagcagggggtctctgagccgtctgaccccacagccgaccaagctccaatccttaccgcctcctagtgttgtggatgtagcccagggtgctcccacatttttcagatgagaacaccgaagctcaaaacaggagcgttttgtccacattggatacacgatgtctgtggtttggtcctgaagtcactttatatctcagtggtccagactggagtaggacagggggttctggggaatggggaaggtgtctcaggtgaaaggaaggaattccagattctccatactgtccttgggaagttagaagactcagagggtctggcaaagtcagacaaagcaagagaaatgcagtcaggaggaagcggagctgtccaggaacaggggggtcgcaggagctcacccccaggaactacacttgctggggccttcgtgtcacaatgacgtgagcactgcgtgttgattacccactttttttttttttttgaggtggagtctcgctctcttgcccagtctggagtgcagtggcacgatctcggctcactgcaagctctgcctcccgggttcatgccattctcctgcctcagcctcccgcgtagctgggactacaggcgcctgccaccgcgcccggctaatttttgtatttttagtagagatgggatttcactacattagccaggatggtctcgatctcctgacctcatgatccgcccgtctcggcctcccaaagtgctgggattacaggcgtgagccaccgcgcccggcccgatttcccactttaagaatctgtctgtacatcctcaaagccctatacacagtgctgggttgctatagggaatatgaggcttacaggccatggtgctggacacacagaagggacggaggtcaggaggtagaagggcggagagagggaacaggcggaggtcacatccttggctttcaaaatgggccagggagagacaccctctgagcatggtaggacaggaaagcaagattggaacacattgagagcaaccgaggtggctgggcgtggtggcttacgcctgtaatcccaacactttggaaagctgaggtgggtggattgcttgaggccaggagttcaagaccagcctggccaacatggtgagaccccgtctctactaaatatacaaaaattagccaggcgtgatggtgcatacctgtaatcccagctgcttgggaggctgaggcaggagaattgcttaaacctgggaggcggaggttgcagtgagccgagatcccgccactgcactccagcctgggccacagagtgagactccatctcaaaaaaaaaaaaaaaaaagataaaaagaccaaccgaggaattgaagtgggggggcgtcacagtagcagaagggggatcgtggagcaggccaccctgtggtcatgcactggaagctcattacctgacgatttggagctcatcactgggggcctaaggagaatagatactgaaggatgaggagtgatggcgcggggcacgggtgtctttggtggccagaacttggggactgctggggtgcctcactgcaggccttctcagcgccctttatatgcttacacaggctgtttctaagagggggatacattgcataagcgttttcagactacctcatcatgggtccctttctttaccctctgtggccctggtggcgcactctctgggaaggtgcaggtggatgcccagacccgccctgccatccacctgcacgtccagagctgacttagcctcgagattgctgctggcacctcctgccccgggacacctcggatgtgcccgtggagatgctggctctgtgttttctgctggagtttggtgcgtcttttcctcctgcaagtggccaccgctcttgggtatgtcctcaggcttctgcgagtcatggctgcttctcaggtccttgcccagcgccaggagcaaaccctcctggcactttgttcaggggtggatgcgccagtgttcctgctgtggaccgccatctcacatgagggtcttgggcctgcaggctcgttcaggaaacacccgctgagtatgcagtgtgtgccagctgtgtcccaggcaatggcggggacagtggctgctgctggggttgtggtggcttctggggactctggggacagctgaggtgcaaggagccacggctccttgaggatgcagttggactccaggtggaagggatggttgggggaggtataaatggggtcagggaggagacacatttggaacaatgggaacatttttaagatgctatgtcgggaggcaacaaggtggccaacccaggtgctgaggagcccacaccagccctggacgtgttttgccgctcacctttgctggggagtggtgggagagaggattccgttccacgtggtggtgtgcgcagctgggctgtgtggagctgggcgctaggaggaaggtgctttctgcggggctagccgggctctgcctttgaacacaatcaggctccaggttttcagcatccagtgcatgagaggacttcacgggcagctgtggctgatcccttgatgaattgggagaagaacaaaggtctatgaaatgaggtttcatgtagatggcattagagacgcccacaacagatttacagagtggagcggagacggcggatgggtctgggaggcccctcctgctggccttgactgtgacagctgtcctgggaatcagcttccaggccgccccagcagcctgactgacacacacaggggttttagccccatcctgcgaccagctgttgccatcatcagtgacagctgggagtggcggtggttccagccctgggcaccctccccacctgctggggcccacccagggcagtcctgacacctacaggttgcttggagccgcatccgagtcctgccccaccacgtgtgaagcccgagtggtcgtgggctgaggtcccctgattgcatccccacttcccttctgcttcacatagctgcctcttctcaccgtttttccagcctcctgggctaggaattccagtgttgtgctggctttgccccaggacacctccttagccctcttcctgagtctagagccccgggggttggaagtcctggcccctgggacacctgcagccacactcagcttctcctgtgagcctccagcatgtcccctcaggaccaagccctcacgttcttgcctccccgcccacctgggctcagccaggggaaggcctggctgggagcgtctcccctctgccctgcccttctcccctcctaccctgcccttctctcctctgccccgccatggcttttatatcctgtgccacaagacatggctgtgtgtgaaagtggcagggtctggcatctctgtgggtctctgaggcccacgctccagtgccactcttcccacccgctggccgtgccctcatgctggagggacagcccagccctctcccgaaccccagccccatgtgcccagctgcccccggccctctcccctggaagccggggtcactccagccgtatgccatggtggggacatcctgcttccttggccttccagggaaggtcctctttccaaatggcgacacctggtccctgcctggaggctggaagctgtggcccttgtatgcccctccagggtctgtgcgctcggttggcccgagttcccatcaccgtcatcatcaccatcatcattgtcatttcgcttgtctgtgagccggcctggtctcccagagcagagaccctctgaggtccagcctgagttggggtctccgtgctgacccctgacggggactcaggacgtaccaggtctgggtcaggagtgacccccaaacctcgtgccctttgacaggcacccctgacttttgctaagtgggtggaggtgacatcacttacagcgggagtgatgggacagggtctgttggctgcactgtgctcccagggatctggggagaggctatatccctgggctttggcactgcagagctgtgtgtgtttgtgtgtgtgtgtgtgtgtgtgtgtgtgtgtgtgtgtgtgtgtgtgtttgcgtgcgcgcacatgtgtataagatctttttttattacatgaagcaagataactgttgctgtttccttttgggttttgtgttcaacagagtggggtacttcttccctcagacaacagaactctcccctttaaacacgtgctgtcagagggtgggtcttgggctcatgtctgtttgcacagccgagtcagaggaaacacagggttcttcataaaaacactgcacagcaggcgactgtccagagtcagcctgcaggacggcagcagccctgcccctcagagcacagctagggtgggctgctttgggatctcccgtcattccctcccagctggcagccggcggccggcccattccttggtgtgctggtcaggggggcgtgcgcctgctctgctcaccctgggaatgggacagaagctggcagctcggagaggacagggctggacccttgggtggcctctggctggaccatctcattgtcctcagacacagcctctcgggtctagtttcatttcctgaaaaacaagtgcacagaactagagcaggagtcgagagctacggcccccgggccagatccagccctgccacctgttttcacaccatgctcaagctgagtgggttttacattttttaattacttgaaaaaaaaaaagccaaaggaggtttcatgacccatgaaaattatatggaattcaaaaaaaaaaaattatatggaattcaaatttcagtgtccataaataatttcttgagacagggtctcgctctgtcacccaggctggagtgcagtgctatggcatggctcgctgtacccttgacctcccaggctcaagcgatcctcctgtctcagcctcctgagtagctgggactacgggtgtgtgccaccaagcccggctaatttttttttaattttagtaaagacagggtctttctatgttgcccaggcttttctggaactccatcttggcctcccaaagtgctgggattacaggctcgagccacggagcccagcctgtttttgttttttcactgataaagttttgccgggtgtggtagtgtgtgcctctagcgatttgggaggctgaggtgggaggatcgcttaagcccaggagtttgaggctgggctcaagtgatcaggaggtgaactatgatcatgtcattgcattccagcctgggtgacagagcaagaacctatctcttaaaaatatatatttaaaaagtattgggtgtggtggctcacgcctgtggtcccagctacttaggcatctgaggtgggaggatggcttgagcccaggagtttgaggttgcagcgagccaagatcgtgtcactacactctagcctgggtgacagagcccagaccctgcctctttaaaaaaaaaaaccaaaaaacatgtattggaacacagccatgcctgttcagtcacgtgctctccatgctgctttctgctccagagacccttatggcctgaaagctgaaaatattttctatcctttacaaaaaagtttgctgacctctgtcctggaaaattcatctcccaagttctcttccggcactggcgttcctgggtgtcctaaatttggcccctgttatttctgaactctgttttggctctgttccctcccaggagccaggacaggcacgttctctgcatcttgtcccctgacgcccagaggcttggctcggctcaggcattcttggaaatatctggctccaggaaaggcagaggcctcctgagtcggcccagagggaacctgccccaggtctgggggaggcctgacccagcagagtggcttttgccgatgggttgggccggtcaagatgtgctgaaagttgtcctcagaaggccactttgggattccttcctccagtattagagcaactgagagctgctcattgcaagcctgatgttttcccagttggccgggtccaccgggtgccctgggattctgggatctgggtggaaagtagggggcttgggggagtgtcctgggttctggaatccaggtggcaagtggtgaggttcagggagtggcttctgagccaccataggggtctctgtgggaggctctgcccatccaggagattccgcaggccctgccggcccagagccagcgtcttgcgcttgccgaggctacagccagccccagccgggtggaacagcccgtcgcctcctctcactttgttttggggccacctgggagtgtggagcaagggtagagagggaggaagtggctgccggccgctgcccagcacccttgtttgccttgggccctctgtgggctcctttttattgctcttcaatgaagccagggaaatggacttccttgcctcacttcagttcaacatgtctggaagtttggtattaaaattaagaaagtgtggaaatagagcaagaagagaaaaatctctccaagagataatagtgacctctgagctgggcgcggtggctcacgcctgtaaatcccagtactttgggaggctgaggcgggcagatcacctgaggtcgggagtttgtgaccggcctgaccaagatggagaaaccccgtctctactaaaaataaataaataaataaataaataaatacaaaattagccaggcatggtggcgcctgcctataatcccagctaaggcaggagaatcgcttgaacctgggaggcaaaggttgcagtgagccaagatcacgccattgcactctagtctgggcaacaagagtgaaactccgtctcaaaaaaaataaataaataaaaaataaaaatagtgacctctggccaggtgtggcagctcatacccgtaatcccagcactttggaaggaaggccgagatgggcagattgctttagcacaggagtttgagaccagcctggccaacatggtggaaccccatctctacaaaaatagaataaaatttaagaggtaatagtgaccttttggtagatcgaaacctggattgctttctttttctaaatgctgattcttttctttgtggtgtttgtgttctgtgccgatgtccctcccccagccctgttattgtgagtggaagaaggggaaagggttcgcccgctactgtgagcccctcctctcacgctgggtgtccttggagaagcctgcacttcttcattgtacgccagggctgggtccctccctggagtggttctgtgctgctgggatggggccaacccctcagatgttttctgagtgtcacacacaggtgtgtgcattcatggcctttgcgtgtcttcctgttgtggaggcaaaaatgtgaagaaccctagatgattttgggaccagggctccatcacctgctgttcattgcacaccggagcatccaggcatgggtggagagctcagacttccaggcacggtcgcaggggctggtctaaccatgttcccgcccgcctgctcgtcagaaccgcctgttgggagctgttatcatgataccatacctgggccctgggctatccgattctgacttaattgctccaggttggggccaggccgttgtttgctgttttgttgtttcttctgtgacgttagccactgggctaatctgagcccctcagttacaggtggagaaactgagacccatgggggtgcaaggacttgccgaggacccagagccccttgggggcagagctgaggcggggcctggctttgggtcccagagcttccagtccccttcccgctctcctaacagcttttttttttgagacaagatctcaccctgtcacccaggctggagtgcaatggcatgatctcggctcactgcaatcttcgctagctgcgttccagcgattctcctgcctcagcctcccgagcagctgggattacaggtgtgtgccgccatgcccagctcgtttttttttgtacttttagtagagatagggtttcaccatgttggccaggctgatctcgaactcctgacctcaaatgatccgcctgcctcggcctcccaaagtgctaggattacaggctgggatcacactgtgcctggccctagcagctttgtcctgtgccatccaacaacagatgaccgaagtctttgtttcttaacatgcattccatctgccttacagttttgccacctgcaaaacagaggacttgtcgcttttctggtaagctggaaatgtaatctggtagcaggaggcctgtggaagcttgcctttaatggccttgtgtctctttcatcctgtcctgagagccggagaacttggatgttgcacctaactcaaccttcctgttaacatacagttctgcaggctcatggatcatcagaaccacgtcctatctcacgcggctgtatgcttccgttggttcaggtgtttttaccttgacagtattttctcctcggtggcttttgcggtggttgcttttaatcagcattgactcttcaagaaaaatatttagctgctacatctcagaggagacagggtggaaagcatctgagacctgcaggctcagacttagaaccagaagtgccctcagagttcatccggccctgacccagcgggaaatgagttcacagagaagcgggagaactttgccccaggccctgccgttgctcataactgccccaggtccttacatttgctccaggtcctgccccaggccctgcagttgctcataactgccccaggtccttatatttgctccaggtcctgccccaggtcctgcagttgctctgtgtggtgggtgtgatctggagccctccgcccattgctgcacctggggcaggcattgctaattgatcccaggactccttcctgcggagcacgccctggttctccaggcagccgctgcctgtcagcctgcagtggttcgggagaggacacctgcttgcctggtctgttccaaatcttgcttctcatcccagcacaggtagggggtgctatgggaaagggatcctcagttggccctgtcactgctctatcagctggggacgtggcatcctagtgaaaacatcatggccgggcgcggtggctcacgcctggaatcccagcactttgggaggctgaggagggtggatcacttgaggtcagaagttcgagaccagcctggtcaacatggtgaaacccatctctactaaaaatacaaaaattcgccaggtgtggtggcgggtacctgtaatccgagctactcgggaggctgaggcaggagaatcgcttgaacctgggaggtggagcttgcagtgagccgagatcttgccactgcactccagcctgggcaacagagtgagacgctgtctcaaaatctcaaacaaacaaacaaacaaaaaacaaacaaacaaagcgtcatttatccagcacccctggggaaccatgctacctggtgttttatggtacctggcaaggtgcaggtgaagttgctgctcttgggcattgaacccgtcttgtttggggcagctcaggccccaggcagggtccgggttggctctcgttggtgtggccctggcccatccagacctatatttctgccgtcctgcaggtgatcaatgttgatgggacgaagaggcggaccctcctggaggacaagctcccgcacattttcgggttcacgctgctgggggacttcatctactggactgactggcagcgccgcagcatcgagcgggtgcacaaggtcaaggccagccgggacgtcatcattgaccagctgcccgacctgatggggctcaaagctgtgaatgtggccaaggtcgtcggtgagtccggggggtcccaagccatggctcagccatgcagacttgcatgaggaggaagtgacgggtccatgcctgggcataagtgttgagctcaggtgccccgacctggggaagggcaggacaggaaaggtgacagtatctggccaaggacagatgggaagggaccaagggagctgattagggagtggttatggactaggaatgtcggtaacaatggttagaaagtgactaacatttgttgagcacctgctgtgtgcccggccctggccgggagccttcgtgcccacagtgaccccgtctgcaaatgtagttccttgccctactcgcactggggagcaggacgcagagccgtgcaactcacaggtgccaagctcaggactccctcctgggtctgcctgggctgggctgtgcttgttgcccctgtggcccacgcatgtgcaccttccacctgaaagccaggatcttcaggacgctccccgaggaggtcgttgtctggcacaatgatttgtctcttcctgaaaaggtgacagagttacactggagagagcagcatccaggtgcggcagggacaggcctggggctcgcgggcagggactctgtgtcctgccggggtcccacactgcacctgcttgtcagaggcactcagtcaatctttgctgatgaaggatgagaggacagaggacgtgatgcttgctgctgcattgcctgcagtcctgggtgagatgcccgggttgactctgctgcccgtcgggtggatgtgatgtcagatccccggctttaaaatacgagggagctgggaattgagggagcaggttggggcagaaagcacagccccgtggaagcctggagctgaggcagtgtgggcgacccctggagcagtgagtgcttccttcatggccttcatcgcaccctgcagtcctcatgtaggggatgccatccatgaatttagttttcccagcctcctttaaaaacgcgttcatgctggggccggggcagtgcagtggctcacatctgaaatcccaccactttgggaggccgaggcgggtggatcatgaggtcaggagatcgagaccatcctggctaacaaggtgaaaccccgtctctactaaaaatacaaaaaattagccgggtgcggtggcgggcgcctgtagtcccagctactcgggaggctgaggcaggagaatggcgtgaacccgggaagcggagcttgcagtgagccgagattgcgccactgcagtccgcagtccggcctgggcgacagagcgagactccgtctcaaaaaaaaaaaaaaaagtacaaaaaaaaaaaaattagtctgggtgtggtatcacgcgcctataatctcactactcgagaggctgaggcggagaattgcttgaacccaggaggtagaggttgtagtgagcccgtatcgtaccactgccctccacctgggcaatagagcgagactctgtctcaaaaagaaaaaaaaaaaaagaacatttatgccaggtgtggtggctcatgcctgaaatcccagaactttggaagactgaggcaggaggatcacttgagcccagaaatttgagagtgtcttccctgggcaacatagagagacctcatctctaccagaaaaaaaaaaattagcccggcatggtggcatatccctgtggtcccagctacttagggggctgacgtggcaggatcacctgagtctggaggcagaggttgaagtgagctgagatcatgccactgcactccagcctgggtgacagacagagaccctgtctcaaaaaaaaaaaaaaaaaaaagcatttactatccaccatggaaggtgagactgacctgtgagtgattgttcaaagaacaaaaaataaaccccagagataagacaaaagggtgcctccatgggggtgtgatttaaagctgagaaattgggcttcttccccctcccctctcaccccgtggtttgctaaaggagatgggaaaaaggattctttttttggctgaaatatttaacactaaattaaagccaattttaacagcactttggttgatgagtgaaattaacagactggccaaaaataaacgaacggtctgtactatgtgaaaaagaggcagctttggccatgctgggccaatgtgagttttcagggttgctgggaatgtctgtgaatcggaggaagggcctagctgggactctcaggagccaaggccctgaggggcaacttgcctggtccctgccctgaggcgttcactgctttcttcctgggccagatcacaggcccggaggctggaccactgggctggcactcttgccgagctgctccctgacttcctgaccatgctcctttcagcagccttgctgcactttagtttccttgaatgaaaaatggggatgagaatagctcctacctccaaggtgaatggagtgagttcggacaggtgactccctgggaccagtgcctggcgcctgacaaggtccagtcagagcccgcactgctgttactgatacccttggctgtaccaggggagaacttggttgccattgccaggtgttctcccaccacccccactactgtccctgtttgatgtgtggcgggaataaagctgtgcacattggagcttttggcacatcctggctttcaggtgaaaggtgcgtgtgtgtttgagggtttagcctggccaacccagccatgaggtcggacctgacctgggggtgagtcctgagctcggcacccctgagctgtgtggctcacggcagcattcattgtgtggcttgggccgcacccctttccctgctgggctgttgatgtttagactggagcctctgtgttcgcttccaggaaccaacccgtgtgcggacaggaacggggggtgcagccacctgtgcttctgcacaccccacgcaacccggtgtggctgccccatcggcctggagctgctgagtgacatgaagacctgcatcgtgcctgaggccttcttggtcttcaccagcagagccgccatccacaggatctccctcgagaccaataacaacgacgtggccatcccgctcacgggcgtcaaggaggcctcagccctggactttgatgtgtccaacaaccacatctactggacagacgtcagcctgaaggtagcgtgggccagaacgtgcacacaggcagcctttatgggaaaaccttgcctctgttcctgcctcaaaggcttcagacacttttcttaaagcactatcgtatttattgtaacgcagttcaagctaatcaaatatgagcaagcctatttaaaaaaaaaaaagatgattataatgagcaagtccggtagacacacataagggcttttgtgaaatgcttgtgtgaatgtgaaatatttgttgtccgttgagcttgacttcagacaccccacccactcccttgtcggtgcccgtttgctcagcagactctttcttcatttatagtgcaaatgtaaacatccaggacaaatacaggaagactttttttttttttttttgagacagagtcttactctgttgcccaggctggagtaccgtagcgtgagctcagctcactgcaacctccgcctcccaggttcaagcgattcttctgcctcagcctcctgagtagctgggactacagacatgcaccaccacacccagctaattttttttatatttttagtagagacagggtttcatcatgttggccaggctggtcttgaactcctgacctcaggggaacagacggggttggcctcccaaagggcggaaataacaggggtgagccaccgttcccggcctaggaaaactttttgccttctaaagaagagtttagcaaactagtctgtgggctggccttctgattctgtaaagaaagtttgattggtggctgggtgcggtggctcacacctgtaatcccagcactttgggaggccgaggtgggcagatcacctgaggtcgggagttcgagaccagcctcaccaacgtggagaaaccccgtctctactaaaaatacaaaaaaaaaattaaccgggcatggcggcgcctgcctgtaatcgcagctactcaggaggctgaagcaggagaattgcttgaacctgggaggcggaggttgtggtgagctgagatggcaccattgcactccagcctgggcaacaaaagtgaaactccgtctcagaaaaaaaaaagtttgattggtgtaaccaaagcgcatttgtttatggattgtctgtggcagcttttgttctgccgagatgagttgtgacagatctgtatgggctctaaagcctaaaacatgtgccatccgcccctttacagaaaaagtgtgctgacctctgttctaaagtattggacaactacaatgtttgctcatttattattctatgatttgttttctgctttttgttgttgttgttgttgttgagatagggtttccctctgtcactcaggctggagtgcagtggtgtaatttcagctcactgcagcctcgacctcctgggctctagtgatcctctcatctcagcctccctagtagctgggactacaggcacacaccaccactcctggctgattttttttttttttttttttttttgtggagacagggtttccgcatgttgcccaggctggtttcaaactcctaggctcaaacacccacctcagcctcccaaagtgctgggattacaggcgtgagccaccatgcccagcctattctactgtttgtattacatagctttaaaagattttttatgactttaagtcacaagggttctttgtagaaaaaaatatatatataggaaagtataaaaagaaagtaaaaattgtccataacctctccagccagagacgaccgttgctgacacctcagcatattgcctttaagtcttttttctctaagatagcatttctcttcatcacagtcatatgctacgcagaattctgtatcctgattttttcacttgacattacaacaggtatttgatggcgctgtgacaaactctttggcacaatcttttaaatgtatgaaatactccactgcacagatgtttgcttttaggcttaactgttcttttattttgcgtgtgctggttacagccgggcacagtggctcatgcctgtaatcacaacactttgagagggtgaggcaggaggatcacttgagcccagaagtttgagaccggcctgggcaacatagtgagaccccatctctacaaaaaacttttttaataagtcgggcgtagtggtgcatagctgtagtcccagccaccaaggaggctgagttgggaggattgcttgagccccaggaggttgatgctgcagtgacctgagattactccactgtactccaacctgagcgacagagcaagacttgtctggggaaaaaaaaaaaaaaaatatatatatatatatatatatatatacatatatacatacacgcacacacacataatataaaaatatatatttataaatatataatatataatataaaaatatatatttataaataaaatttataaattatatttataagtaaatatataatatataatataaaaatatatattatataatatataataaaatatataatataaaaatatatatttataaataatatataatacatacttataagtatatatttaaaatatatgtaatgtatattttttaatgtatgatatataatatacatttataaatacacatttatattattttatataaaatatatataaaatctccaagttgctttttccaaaaaggtgtcttgctgcatttcaaacattcatttaaaaacttgaatgctggtgatctggtccagaatgtgttcagtagctgctgccagtggccaagcatctcgggagatgtctacaaaacacgctggttctggcctggcgtggtggctcacgcctgtaatctcagcactttgggaggctgaggcaggtggatcaactgaggtctggatttcgagaccagccttgccagcttggtgaaaccccatctctactaataatacaaaaaaattagccaggcgtggtggcatgtgcctgtaatcccacctacttgggaggctaaggctggagaatcgcttgaacccagggggcagaggttgcagtgagccgagatcgcaccattgcactccaggctgggcaagaagagcgaaactccgtctcaaaaaaaaaaaaaaagatgctggttcctaaaatgtggcccttttcctcctcacctgctgccagaccatcagccgcgccttcatgaacgggagctcggtggagcacgtggtggagtttggccttgactaccccgagggcatggccgttgactggatgggcaagaacctctactgggccgacactgggaccaacagaatcgaagtggcgcggctggacgggcagttccggcaagtcctcgtgtggagggacttggacaacccgaggtcgctggccctggatcccaccaaggggtaagtgtttgcctgtcccgtgcgtccttgtgttcacctcgtatgagacagtgcgggggtgccaactgggcaaggtggcaggctgtccgtgtggccctcagtgattagagctgtactgatgtcattagccttgatggtggccaggactggtagggccctcagaggtcatggagttccttcgtggagcgggtgctgaggctgtatcaggcacagtgctggctgctttcacctgggccgtctcaccgaagtgtccatggagcctgcgtagggtgggtatctgtgtcgattttacagatgcagaaacaggctcagagaaaccgagtgacttccctaaggtcacatacccagttagagcagagctgggccaggaagtgctgtctcaggctcctgaccaggtctccttgctttgcactcttgccaaaaccatgatccagaactgactttgaggtccccggacctcaggctcctccgaaatggcctcttggaggctgctgagccacagcttaggacccacctcgagaggcaaatgtgctttgagctgccaggcgtcctgggggccctgccttgggcacggggttcagacaggccccagatgtgtggggcgtctttctggacttgagttttcttttctgtgtggtggacacagtgctcaccccttaaagcacctgtgatgtgtgcagcagcccaatccctgcctgtcgcctgttctgctagggaaggaaggaatacttcaggatggcaggacaacagaaagaggtccaggttttagagcaagggcaggtcaaacttagaaaattctggaatgaggatgtgcatttcctcttctggatctgctaaaagaagagggaaggaggggctgctgggggaggagcccagagccgagtttacatccggatcccgcaaggcctcccctgccctgaggtcttgttttgtgatgtgcttgtgtccatcctggtttctgccgtgtccccaacatccggccaagcttaggtggatgttccagcacacactcaccctgtctgtgcacctgtttttgtgtccgtaagtgggtatttactcaccttacgagtgagccactgtgggaattcagggaggtggcgcagtgaccacccctggagggatatgtgtgtggcaggggtcgagggtctcgcccttccctgcttcctgcgcgtggctttctccaggacggggagggctgagctgaagaggtggggacagttgcgtccccccgccacccactgtcctgcggtgagagcagactcactgagcctgcccttctcccttgtgccttccagctacatctactggaccgagtggggcggcaagccgaggatcgtgcgggccttcatggacgggaccaactgcatgacgctggtggacaaggtgggccgggccaacgacctcaccattgactacgctgaccagcgcctctactggaccgacctggacaccaacatgatcgagtcgtccaacatgctgggtgagggccgggctggggccttctggtcatggagggcggggcagccgggcgttggccacctcccagcctcgccgcacgtaccctgtggcctgcaagttccccaacctggcaggagctgtggccacacccacgactgcccagcagcctcaccctctgctgtgggagttgtccccgtccacccctgggtgcctttgctgcagttatgtcgggagaggctctggtgacagctgtttcctgtgcacctgctgggcactaggtcccagctaatccctgtgccaggactctaatttcaccctaacacacatggtggttttcattgctggggaagctgaggcctgagcacatgacttgccttaggtcacatagctggtgagttcaggatcccccagagataccagggccagcactcgatccccacccagccctgaaccccaccatgtgctgggattgtgctgggagtgtccacacgcctgggaccccagggctggtgctctcatctcctttttccagatcatgagaatgaggctcagggaagtttgaaaaaaacctatcccaagtcacacagcaacaggagcaggatttgaacccagaaaaggggaccgcacactctgttctgctagagtagttagctgtcctgggtgatatggcaggtgacaggggcaactgtgcttaacaaaggaacccccatcccccctgccaagttgggagactagaaggtcaggggcagaagctctgaagggccaggtgcagtggctgacacctctaatcccagcactttgtgaggccaaggcgggcagatgatttgagcccaggagttcaagatcagcctgggtaatgtagtgagacgccatctctacaaaaaaattttttaaaaattagctgggcatggtggttcatgcctgtagtccaagctacttgggaggctcaggtgggaggattgcttgagcccaggaggttgaggttgtggtgagctgtgatcatgccactgcactccagcctgggcaatagagtgagaccgtctccaaaaaaaaaaaaagaagaagaaaaagaagctctgaggctccaagtccccaggcaccccttggcttgagggcagacaagggaggagagggtcacctgggcagccctgacttttgtcccctggcaaagggaccttcagtgaccttggccctaggagagcctctgagcacgtcagccatgtcgaaccgctcaggaagggcagcaagaatttggcttctgacctctgcctctcctactcgccatctgcactgggtgtggttgtgcccattttacagatgaggaggctggggcatcgaccagctgaatgccttgtcccaggtactgcgtaggcagagctggcagttgaaccccgtgtcctggttgtcgctgggggtgggctgcaccctgacttgtgaggccagtagcaaggtttgcacgtgacttcgtgaccgtcacccagctctgcagcacatcccgtgacccagctcatccaggccgcatgcaaacctgttgccaggcgagaaaccagtcaccgcacagctgtggttgcctgaaatgattaagctcattaatcaccccggagtgaggacagactcagatgaaaaccagcaaaagccctggaaactcatgtgaccctgccaatgagggcggccatgtgcattgcagcctggccgtcactcctcggtacgtgttttggacttaaacgctccggatgtttactgagtgcttgattaataacatggaaggcctggtctcattgctgtgggagtgaaggatgcacagccaggcctgacatgatgagaacaagaacctggagtctcgctgcctgggtggtaatcctggccctgccacttagcaactgtgtgactgtagccaggtcacttaattttgctagatcctgcctgcgcttcagtggatcttgctggttttccaaggtggccaaacactttaaggcattcatgtggtcgctaggctgcagggttgaaccctggctcaccccgcagggcgccgtgtgctctgtggcctggctgtgcctttgctgacaccgtgcccgtgtgtgttcatgcaggtcaggagcgggtcgtgattgccgacgatctcccgcacccgttcggtctgacgcagtacagcgattatatctactggacagactggaatctgcacagcattgagcgggccgacaagactagcggccggaaccgcaccctcatccagggccacctggacttcgtgatggacatcctggtgttccactcctcccgccaggatggcctcaatgactgtatgcacaacaacgggcagtgtgggcagctgtgccttgccatccccggcggccaccgctgcggctgcgcctcacactacaccctggaccccagcagccgcaactgcagccgtaagtgcctcatggtcccccgcacctcactccctcgttagatcaggctggttctgggagctgacgctgaaaggagcttctcatctggggttcctgggtgtacatagatggttgggtaggttgtgcactgcacaagctgcatgatgctacctgggggtccaggtccaggctggatggacttgttgcttcatcaggacatagataaatggccaaaactcctcagctggaaggtcctgggcaggatctttgggtgtgaaaaccagtcacaggggaagggtgcttgctcatactgccagcacagtgctgagtgctttccatagcgctcgtttactcctcaagcctggagggtggggagtagcatggtcccatttcacgtacaaggaacccgatgcacagagaggtgtggcaacccatccaaggccatacaactggggtgggttgagccggggttgactgtggcaggctggctcaagagtccctgctcctgaacccttgccaggcagcctggcatcagctcggggaatttttgccctgacccttggaagcaagtgggcctctttgttctcatgtcagtgatgagaagagtgactttcctatggcccctctggagtacaggtgtttcctgttggcgggctcttcccccatgacatcagcagcgagctggttatgattccctacgcagaacttgatagtttataaagctctttgtcatccaggccccgttggagtctcacgcagacctggtcgcaggcggggctggtcttgcctgtcccagctgcatggatggggaacttgaggcttgcaaaggttaaggggctgttcgaggcccacgctggcaggagatgggcctgggccagagtctgggacttcccatgcctgggctgtctttggtcctgttgctcaccatccctccctggggccatgaccttagagagccaaatggaggtgcaggtaacccacggcaaggaggggttgccatgactcagagtccccgtcctgtggccggcagtacctggtgcaacgacttggatttcagaccagccactgtagcccgctgacggtgcgctcgaagtgccacagcttctgaagccaggcaggactcaggccaggagactctgttagctgttgagagggagaggccaacggatgttctggttctgctagagagctggttcttcggatcctggtaccagtgcactgagaggaggcccagcttgattctggggctgccttgtggtggcatgtgctgctcactgacaccctcgaggagtgtcttctctcgggcttgttgactgtgcccggttttccgcagttcactggtgcacacataggcacatagcaaaccgcacacacagtcgtgggtatgagtttcactacattccaccaccagtgttcactaccattacctgccttccgtcttaagtgttcatcatttaaaaataaatttattgggctggacgcggtggctcatgactgttatcccagcactttgggaggctgaggcgggcagatcacctgaggtcaggagttcaagaccagcctggccaatatggtgaaactccatctctactaaaaatacaaaattagctgggcatggtggggcatgcctataatcccagctactcaggaggctgaggcaggagaatggcgtgaacccgagaggcagagcttacagtgagcccagatagcaccactgcagtccagcgtgggcaacagtgcgagactccatctcaaaaaaaaaataaataaataaaagaaaaataaatttatgatctatttcaaaaataacacatgtactttgaaacagcagagacacatatgacacggagaatgaaattccccatagcgcacccccaagagacagccctggtccccccgtctttcccgtggacctccagcggggcagatgctgagccgcctgttgtcgagtggcatgctatcccgtcctccagctcctctgtggcttacagacacccacctgcagccctgtctttgcctcctctagcgcccaccaccttcttgctgttcagccagaaatctgccatcagtcggatgatcccggacgaccagcacagcccggatctcatcctgcccctgcatggactgaggaacgtcaaagccatcgactatgacccactggacaagttcatctactgggtggatgggcgccagaacatcaagcgagccaaggacgacgggacccaggcaggtgccctgtgggaagggtgcggggtgtgcttcccaaggcgctcctcttgctggtttccaggctgctgcccctgtccttagcagagggaggaaacagaggatggctctgggtgaatgatgacttgggcttcgattatgtagtcacagggtatgaccctgagatgcgtggaaccccgagactgtgattatatgtagaaactgggtttccccgttgtttaagtagtcatggtggggtcagaccccacaggacttttgtcttttcaagaaagaaaatggtcgtgtgtcatgcaggggtagttggtactggttaatccaggtttatcctttattttgtgggaactgtacagtcatttctgctacaatgctgtatatgctcttctgaaagacacctatgcaaaatcgcacagtaaaaatgacacaactcatagggaaagcggggccagggcacagccctcaaaatctccatcaatgacatgtaagaaaagagaggaacctgggaaatagcaaagtgccttttgcacattaaatggttagctatatcccacaatactgtgcattcgtaaacgttaatgctgcaataaatacggcacttcaccttgggaagatctggagttggcttatgagtgtggaagggtgtagcgcatgagtttttgtgaaacactggaaggaggattgtgggaaatcaaatggaaagttctcaccccaggcgtggagaagagtgggtcatggccccagcagtgagcccagggaggtcagagacggaggtgtgtgtgtgggtgtgaccctgcgcagttccctgccggctgtagttttttgcattcgcttaatgtttctcgtggaggaaattgtgcatgagcaaatgtgaaaccgtgctgtgctcaaattgtcctaatacatcattgcattggaacagattggctttnttttttttttttttttttttttttttttgaaatggagtctcactctgtcaccagcctggagtgcagtggcatgatcttggctcactgcaacctttgcctcctatgttcaagtgattttcctgcctcagcctcctgagtaactgggattacagggcatgagccaccgcggccggccagatttgcatttttgaaacaactgctaggctgggcgcggtggctcacacctgtaatcccagcactgtgggaggccgaggcaggtggatcacctgaggtcaggggttcgagaccagcctggccaacatggtgaaaccccgtctctactgaatatacaaaaatcagctgggtgtggtggcgggtgcctgtaatcccagctactcaggaggctgaggcaggagaattgcttgaacccaggaggcagaggttgcggtgagccgagatcacaccattgcactccagcctgggcaacaagagcaaaactccatctcaaaaaataaaaaatagaaaaacaagtgctgtagcggaagtgagcactttgcggagtcaggcttgtgtggcctgttccacaaatgatgtgctcacggtggcctcaggcccacctggagtctgcagcatggggcacaacaggttcattagtgtagaattccaggacaggcctggctcctaagcagccttcttttacaaaaactgcagagcccgcctgtatcgtagcactttgggaggccgaagtgggtggatcacgaggtcaggagttcaagaccagcctggccaacatggtgaaaccccatctctactaaatatacgaaaattagctgggtgtggtggcacgcgcctgtagtcccagctactcgggaggctgaggcagaattgcttgaacctgggaggtggaggttgcagggatctgagaccatgtcattgcactccagcctgggcaacagagcgagacgccatctcaaaaaaaaaaaacctacagagccacacggcctctttctccaccgagtgttggtgtgggagcttgtgttattgtggtgaaatcttggtactttcttgaggcagagagaggctgagcgcctggagagactttcacatgggtcgccatgtccgccgtcggtttcgctgttgtgctccccatctgaaggctggtgccgtccagacaggctggacgcccctttccaccagatccttcctcccgcagcagtttctagttacgttgtactgtgaggtctgtgtccttggttgatggcaaaagtcagccgaattgaaattcagagccatgcctggctccctggagcttctctcctgggcagctgtgatcattgcctctgctgtggtgtgggtggtggaaatggattcctttcatcttgcttgctacaggtgactgtcacgtggagtcctttggagagagggacgtgttaattgatggatgtggctcccatgctgagaaagctcctgggcgtacattgccttagagtttcattggagctgcgttcttttatggtgtctgctaggcagaagtgatgaagacttggaagaaaacccagaaggttttccacttaatttggaaaatgtgcttttcccctcctgtgtcttttgctaaggtccagcctcctgcagcctccccgctctgtggactctggctttgattctttattaggagtccccctgctcccccaaaagatggtgtctaaattatcatccaattggccgaggttttgttttctattaattgtttttattttttattgtggtaaatttatataacataaaatttgccattttaattgttttgttattgttgtttttgagacagggtctcaccccagtgcccaggctggagtgcagtggtgcgatcatggctcactgcagcctcagcctccagggctccagtgatcctctcacctcagcctctctagtagccgggactacaggcatacactaccacatctggctgattttttgtattttttttttattgtagagacccgctatgttgcccaggctggtctcaactcctggactcaagccatcctcccacctcaccctcccaaagtgctgggattacaggcatgagccacaacacccagccattttaatttttttttttttttttgagatggagtctcactctatcgcccaggctggagtgcagtggcgtggtatcaactcactgcaacctctgcctcccaggttcaagcgactctcctgcctcagcctcctcccgagtagctgggattacaggtgcccatcactatgcctggctaatttttgtattttttagcagagacggggtttcaccatgttggccaggctggtcttgaactcctaacctggtgatccgcccgcctcggcctcccaaaatgctgagattacaggtgtgagccaccgtgcccggcctttttttgtttttgagacagggtcttgccctgtcacccagactggagtgcaatggtgggctcttggctcactgcagcctccgcctcccaggctcaagttgtgcacctccacacctggctaactgtattttatgtagagacagatttcaccatgttgcccaggctgggcttgaaatggactcaagcagtccacccacctcagcctcccaaagtgctgagattacaggcgcgagccaccgcacccagcccattttacctattctgcagttgacagttcagtggcattcagtcagttcacgaggtaaccatcactgccattcatctccagactacttcaccttctcggcagatgtccgaaactgtccgcattgaacacactcctcatctccctctgacagccaccattctactttgtatctctctctgccttctctaggtacctcatgtaagtggaattataccaatatttgcccttgtgtgactggcttctttcatgtgacatggtgtcctcaaggttcatctgtgttatagcctgtgtcagaatttccttccttaaagcctgaataataacccgttgtaaaggctgggcgcggtggctcacaccctctaatcccagcattttgggagtccgaggtgggcagatcacttgaggtcaggagtttgagaccagcctggccaacatagtgaaaccctggctctactaaaagtacaaaattagctgggtgtggtggcgcgcacctgtaatcccagttactcaggaggctgaggcaggagaatcgcttgtacccgggaggcagaggttgcaatgaaccaagattgtgcctctgcagtccagcctgggtaacagagtgagacttcctgtctcaaaaaaaaaaaaaatcatcggatggatggacggaccacttcttgttatttatccatccacgggtgctaggtttcttccacctttggttgtcgtgaataaggccactatgaacatttccttccgtggtgaaggttttgtactagtgaggaaaaggcgtgtttgtggtgttgcataggattctggtaagaaagtttgcactaaccataagtatttgtactacattaaaatgaaagctcaggggccgggcgcggtggctcacgcctgtaatcccagcactttgggaggccagggcgggcggatcatgaggtcaggagatcaagaccatcctggccaacatggtgaaaccccgtctctactaaaaataccaaaaaactagccaggtgtggtggcgggcacctgtagtcccagctacttgggaggctgaggcaggagaatggcgtgaacccgggaggcggagcttgcggtgagccgagatcgcttcactgcactcgagcctgggcaacagagcaagactccgtctcacgcaaaactctgtctcacgcaagactccgtctcaaaaaaaaaaagagttcagggtttatgaaactggccagccgcgtaaagtttgctgtgttgtttttgtgcccgggaggagtgtggccagggtgtcacgtcacacagtacacgtttctcagatggtggttctccagactgctgtcccaaagtctgtttttgcatctggttcccacagacccaccctccacggtgagcctgattttggccagggtagctggaatcttgcttgtctttcagcccggcagctgtaccagtccagggtccacagctagtggcttttaggaaggaatttgttcagttggctttgacacatggccccctagggtccacagctctgtagtgatgtggatgttgttatctacaaagacacatgatccttcgtgtccagatgaaagtgatgatgtctttgcagctgcccagcaaggctgtgtgtgtgtgtgtgtgtgtgtgtgtgtgtgtgtgtggtgtgtgtgtggtgtgtgtgtgtgtatgggggagggaggcaccctttccatctgggggtgtgtgtgtgtggggtgtgtgtgtgtgtgtgcgcgtgtgtgtggtgtgtggtgtgtgtgtgtgtatgggggaggcaccctttccatctgggtccaagagactgggcctggggaagacgcttctttttatctacttagagactttgttttatttgtatttttttgagacagggtctcactctgtcacccaggctggggtatggtgatatgagcatagctcactgcagcctcggcctcccaggctgaagcgatcctcccacctcagccttctgaatagctgggactgtaggcgtgcgtcaccatactgagctattgttttttttgtttggttggtttaattttttttgatacagatggagtcttgctatgttgcccagactagtctcaaactcctgaactcaagtgattctcccacctcagtttcccgacattctgggatcacaggtgtgagccactgctgtctccctgttttattaactgctgaaagacctagataaagaaagtctgaaaagacttactatcagagcaccatcctaagatgattccctctgactcaatggagagggaggggagcttttccttcaggcctgggtggcaggagcccaggtgctccaggccccatttgccccaggccaaatcactcgggaacttggatgcagctgtctttcagggtaacccaaaggaaccagatccccgcaggcagtaggcttctgggctgtcctctcctcctacgtcagctcagtaagagcccttcgaagggatgctgtgtcggaggccccaaaagcccaggctcatccctgagatgcacagggtgggctgggcttaggcagcgctcgagcatctcctggacggtgaccccagagagtgtggagacggagagtccttgagagtcactgagagacgtggctgccctgccttcccaagaggggctctgagtcattccccacactcacctgcccctacccaccctcacctggcccccagcctcacctacccccacatctgtaccgatccctttacccgcaccttccctacccaccctcacctcccctgtaccttcacctcccccactcacccgcccctgcaccctcacctgtcccccaccttcacctaacccccaccctcacctgccctcccctcacctggcctccttccgttggggaaggggttgtaaggggcggcccccaaactgtctgtcctggtgccctgcagagaaaacagtacgtgagggccgcagtccaaaagcttgagtcctggaaggtggaggagacagggatgtgttgggaagggccccatggtcttggatcccttctcgactgtcaatggggccttcatgggagcgccagtctagtgatgcacagctgggtgcccggcgggtggctgaggaggcctaaagtccgaggcggcaagagctcttccagaggctgttgtcctaatcgctctggcatactcaggcgggcacgtagttaggagctgattggagaggagagacccccacaccaatactgggatttgactttcaggctaaacttgagaagtgtggcctctgctgtcctgccagagctctccagccagtgcccagggctctccagccagtgcccgggggtctccaccagtgcccgggggtctccgccagtgccaggggtctccgccagtgcccaggggtctccgccagtgctcaggagtcttggtttctttgtcttacagccctttgttttgacctctctgagccaaggccaaaacccagacaggcagccccacgacctcagcatcgacatctacagccggacactgttctggacgtgcgaggccaccaataccatcaacgtccacaggctgagcggggaagccatgggggtggtgctgcgtggggaccgcgacaagcccagggccatcgtcgtcaacgcggagcgagggtaggaggccaacgggtgggtgggggtgctgcccgtccaggcgtgcccgccgtgtcttctgccgaatgccagcctctcacaggctggggagactttccaccctggggatccaatgggtggctttccagggtcccaaaagcaaacacaggctctttcacagcccctccaggaaagcagaaagccccaagggctggaagggaagggggagctctgctgagaggttacaaggcagcgctggccgacgggagttgcagttgataggttttgtatcatccttgttaaacttgaaccctgtgcagaaatcccttccacggcatgggggctgcctgttgactcgctcctgttccaccacagggagctcctgggcttcttcctcccagaggcccccgacgctcccacctgttggtcgtcagagcttctggttggtgggaaggcacccaggaccttgaggtctccagagagaaaagccagggaaagagggagaccgaaacccatgtgacatgaaactcaggctccaaactgagcacgggaacgtttggggacaggagcgcgatggccttcctcagatagctggggggctggcatgaagacgggagctacagccagcacaggtcctgggccgggagcccagagattgagccctgactctgtcacttactggccacgtgaccttgggcgggtggcatagcctcttggagactcagtttcctcattggtaggagtgacggccacagtggtgcggcctctgcagcacacggggggctcggtgggcggaagccccgggtctataaggcggctgtgcaggagccagccgagctggtctcccaacagccagggctccggggtccttagcagctgtggggggcctgcacctgtttcccatggctgctgtcagaaattaccagaagccaggtggctgagagtaatggacacttgttctctcacagttcctgagggctgaagcccgagatcgaggtgtgggcagggccctgcgccctctgaaggctctgagggaacctttgggcttctggtggctccaggcaccccttgacttgtggtcctgtcactccagtctctctgtctggctgcacatggcgtggcctcttctgtaccattgaaggacacttcagttggatttagggcctaccctcacccattgtggtcgtatcttgatccttcatgacatttgtaaagaccctgcttccaaataagctcacattctgaggttctggggtgagcgggaatttggagagcattgttcaactagtatagaatgtgacctgtcagcctcgggcagccctgagaggcaggggctttccacagcccagctgggtgccctgggctccgtgctgtccgaggagacgccatccccacacccgtccttcacccgccaccctcccgcaggtacctgtacttcaccaacatgcaggaccgggcagccaagatcgaacgcgcagccctggacggcaccgagcgcgaggtcctcttcaccaccggcctcatccgccctgtggccctggtggtggacaacacactgggcaagctgttctgggtggacgcggacctgaagcgcattgagagctgtgacctgtcaggtacgcgccccggggcctgccctaaccgcagacacccggccttcattgtcagtaatggcagcagctgccacattgtccgagacctgccgtgagcccagtgccgcgccaggggctttgtgtgtagcgtgttttgtcctcacactgacagctgtaggctggggttctgagtgagccccacagggcagaggcagaaaatgagtctcagagagggtgagcgagctgcttggggccccacagcaggagatggagcaggactgcagcctagcctctgcccccagcacctgcgcaagaagctgctctgctctggactgtgttaggctgcgagggctggagagaaatgagagttggtgcttagagagggggcgcaggtccccatggcttttcctcttatgatgaggtagatgggtgaagggaggggccatgcttgcaggggccagtgaccgaggcccgccgttggaactgatggccttcatcccgagcccagcccaggtgggagcagggctttccgagggcttgtcttgggtcggcctgcttccagggactctgctgcagctcccacccctgtccaaagcatggaatcccccaggctccctggcagtcctgtcaacctctgtcctcccaagctgagtgtggggcaagttctggaggtcagcactgctcaggggggcccacgggctgcttgcaggggccaaccgcctgaccctggaggacgccaacatcgtgcagcctctgggcctgaccatccttggcaagcatctctactggatcgaccgccagcagcagatgatcgagcgtgtggagaagaccaccggggacaagcggactcgcatccagggccgtgtcgcccacctcactggcatccatgcagtggaggaagtcagcctggaggagttctgtacgtgggggctggcagtggggtgggcagggtggcctctaaacccgacccctggaggaggctggaggccagtgcaagatcctgtgtggcctcagccaggcggtggtctctgccagatgccaactgttgcccgctggggttcagcgacatgtccgaatgtcccgaggcctctgaggttgttttcttttgccgcagaacaaatcaccacgaacagcgttttaagacaacaccaactcttttttttttttttttttttgagtcaggatcttgctctgttgcccaggctggggtgccctggtgcaaacacagttcactgcagcctcgacctctgggcttaattaagtgaacaccttgcctcagcctcccaggtagctgggactacaggtgggcaccaccacacctggctaatttttttttgtagagacggggtttccccatgttgcccaggctggtctgcaactcctgggcacaagctatctgcctgctgtggcctcccaaagtgctaggattataggtgtgagccactggcctgacaacacccacggattgtctctcagttctgtaaggcaaagtccaggcacagcgtggctcacctgggttctctgctcagggtctcacggggccagaatcaaggtgtcaggaacgctgggccctcagcggaggctctgtggagaaattagcttccttgctcactcagcaggtagcagttgtgggatcgaggttctgttttctctctggttattggtcggggaccactctcagctcctagaggccaccccaggtccttgccccgtggccctctctgcctcagcagtgggggctccctgcgtcagtccctcccgcaccttgagtctctctgatttgcttctaaagggccctgtgattcggctcagccacctttagattaggttagcctcccctttgatagactccaagtcggctgattaataaccttactcacatctgcagaatcccttctgccacataaggtcatgacgccgtgctggggactggggtgggaaattacggggtcatttaggattctgcctgccactgccttgctgtgtcccagggcttgggggaggggcctccacagctgggaccacagtccttcctcccctccatggtaaccatctgaggattacttgagaccagcctgggcaacatggtgagaacccatccctacaaaaaatacaaacaaaaagggaccaggctgggcttggtggctcatgcctataatcccagcactttgggagaccaaggtgggctgatcacttgaggttgggagttcgagaccagcctgcccaacatagtgaaatcccgtctctactaaaaatacaaaaattagctgggtgtggtggcaggcgcctgtattcccagctactggggaggctgaggtgggagaattacttgaacctgggaggcggaagttgcagtgagccaaaattacgccactgcactccagcctaggcaatagagtgagactccgtctcaaaaaaaaaaaagggccaggggtggtagtgacaaagagaccctatcccaaaaaaaccgaacactgaatccttgagactgagtaaggacactgtgaaatttttctgggtggggcagggaacagagcgtcttctgtcatttcttccacctgggtgtggtcagctctccctccaagctgcctcctcttcttctcattgtccgggtgttggacacatttggttaactggatagaataacgcgagttcccagggacttggtccatttgctattttattttattttattttattttattttatttatttatttatttatttatttatttattgagatggagtttcgtttttgtcgcccaggctggagtgcagtggcgcgatctcggttcactgcaacctctgcctcccaggttcaagtgattctcctacctcagccttccaagtaactgggattacaggcacccaccaccataccaggctaatttttttgtatttttagtagagacgggttttcgccattttgcccaggctggtcttcaactcctagcctcaggtgatccacgcacctcggcctcccaaagtgctgggattacaggcatgagccaccacgcctggcaccatttgctattttaattcccatgtgtattagtgtcccacggctgctgtaacaaatgaccacaaactggatggcttaaagcaacagaaatggattcccccaatgtgctggagaccagaagcctgcgaccaaactgttgggagggctgtgcttcctctgggggctccagggaggatctatttgttggcccttccagtgctgtgggtgccagcgttccacacttgtggatgcgccgcctcaacctctgcccatcttcatgtgtccatctcctttgtgtctgcgtctttacctcttcttcttgtctgtgttgcctcttataaggacgtttgtcattgggtttagggcccacccaaatcatccgagatgacctcgtcttgagatccttaacctgcaaagaccctttttccaaaaaaaggttatgctcacagattctaggccttaagacatgggtgtatctttctggggggcactatccaaccccttatacaatgaaagacgggaagagggccaggtgtggtagttcacgcctgtaatctcagcactttaggaagctgaagcgggaggatcacttgagcccaggagtttacaagtagctaggcaacatgatgagaccccatttctacaaaaagtaaaaaaaaaaaaaaaaaaaaaaaagccaggtgtggtggctcacacctgtaatcccagcactttgggaggctgaggcaggcagatcacgaggtcaggagattgagaccatcctggctaacacggtgaaaccccgtctctactaaaaatacaaaaaattatggccgggcgcagtggctcccgcctgtaatcccagcactttgggaggccgaggtgggtgaattacaaggtcaagagatcgagaccatcttggctaacacggtgaaaccccatcaagatcacaaggtcaagagatggagaccatcctggctaacacggtgaaaccccgtctctactaaaaatacaaaaaattagccgggcatggtagcgggcgcctgtagtcccagctgctcgggaggctgaggcaggagaatggcgtgaacccgggaggcggagcttgcggtgagccgagatcgctccatgccattgcactccagcctgggtgacagagtgagactccgtctcaaaaaaaaaaaaaaaaagaaaattagccaggcacagtggcaggtgcctattgtcccagctacttgggaggctaaggcaggagaatggcatgaacccgggaggtggagtttgcagtgagccgagatcatgccactgcgctccagcctgggcgatagagcaagactctgtctcaaaaaaaaaagccaggcatggtggtgcatgcctgtagtcccagctactcaagaggctgaggcaggagggttgttcgacccacggagatcaaggctacagtgagccatgatcgcaccactgccctccagcctgggtgacagagtgtgaccctgtctcaaagtaagtaaataggaggagagacaagtgggcagttcagactgatggtatgggcacagtagagactggtgcagacaggctggcctgtgatgtcaagcaacttctgtaactgtttccggcatccatttgtgtgtcaatttccgtgtcagtaggaagactctgtaggctgccaagaggaataagtgggaggatcctcccagagaggccgggcctgcaggagggccagttctcatgagttcttatttggcccctaccctccaggctgtggttctgaggtgggagacagagcctgacctctgtttgtcttgttttgtctttgcagcagcccacccatgtgcccgtgacaatggtggctgctcccacatctgtattgccaagggtgatgggacaccacggtgctcatgcccagtccacctcgtgctcctgcagaacctgctgacctgtggaggtaggtgtgacctaggtgctcctttggggtgatggacaggtacctgattctctgcctgctaggctgctgcctggcatccttttaaaatcacagtccctgtggcatccagtttccaaagctgattgtgtcttcctttgccctcctttcttttctactatgtgcattcggtgctatgaattttcctctaagtactgcgtttcctgcatctcacaaattttgttacattttcattttcaggtagtttgaatatttttacacttctcctgagatgacatctttggctcatgtgttatttagaagtgttgcttagtttctaaagagttggggcttttccagctgtctctctgcaactgatttctaatttaattctactgtagtctgagagcttattttatatgatttctgttattttaaatgtgttgggtgtggtgtttttgttgttattgtttttgtgtctttttgttttgttttgcttcgtttgttttgtttttgagacagtgtcttgctctgtcactcaggctggagtgcaatggcgcgatctcagctcaccgcaacctctgcctcccgggttcaagtgatcctcttgcctcagcctcctgagtagctgggattacaggtgcacgccaccatacccagctaatttttgtatttttagtagagacggggtttcaccatgttggtcaggctggtctcgaactcctgacctcgtgatccgcccacctcggcctcccaaagtgctgggattataggcgtgagccactgtgcctggccattaggtgtgttttatcacccagcatcatgcagtttatcttggtgaatgttctgtgtactcttgaaaagaatgtggattctgctgttgttgggtggagtgttccagaaacatcaattagatccagttggttaatagtgctcatcaggttgtctctatccttccttcctgactgcctgcttgagctgtcagttattgacaggggtgtggagtctccaactctaatggtggatttgtttatttctcctagtagttctatctttttctctccttctacccttgatcctcttctccccctagggcttcctggtgttggtggtgggagagtggggtagtgaagaacctggactttagggccaaagaggccagggttcaaatcctggctctgtcacttcccagttgagtgaccctggctggtgcctgaatctctgtgagcctccacttcctcctctgtgaaattgagagcacttacctggcaggctgtcatgggcatcaagtaacagggcactccacctggaccctgacacgtgatgcacaggaatgccagctgctatgccatgggtgtggcagtagtaataaagtgaccatctgtatcctcaccacagtgaagcctgtccagggctttctctcctatgcccccatgcctccaggtggccttggatcctgttggttctgtgctctgctcagcgacctttctcccgtgggagttcctgggggttcagcttcatcctacagacagcagcacacactggctgtgcacccttttttttttttttttttttttttttgagatggagtctcgcttttttcgcgcaggctgaagtgcagtggtgtgatcttggctcactgcaacctctacctcctgggttcaagtgattttcctgcctcaccctcccaagtagctgggattacaggctcccaccaccacgcccggctaatttttgtattttcagtagagatggtgtttcaccatgttggccaggatggtcttgaactcctgacctcaggtgatccgcccacctcagcctcccaaagtgcagggattacaggcgtgagccaccacacccggagtgccggttgtttttagcagtttgtcttgttcctggagagactggctcctgcccaggagctcggggagtagggccgcggggtgctgcctcacacctcgagtttggccgtaagcagaggggacattttgtgactgtccccctcctgagcttcccagcagcttttctccaagttacagcccaaaagctcaggtggatttgcaacccaacggtgtctgtgcacctcccactgatgcccgaactgccctggccaagaaacggggccgtcagaacgctgcactaactgcagccttgggcctccatgccagaggccatgcccttccatccaccaccccctggcctgggccctggccctcctggctcgggaactccaggccccttcctcacggatcgagagacgtgtatttaccgcacaggtgcttgtcattctcttgtggcctcttctccagggagatcacagaaggacagggcctcactgaggtctcggacatggaccctttgatagtggcaggagccaggctgggcaagaggcggccacagtcacctcagcagtgccatcaccaccgccattcagcccttccctgagccgggcgcgcccctggctctggccccagtgtcccagttacagctcacaggagcttgtggtgcccagcggctgcttctgattgagagtcgaggtcggaggctttgggaggctgagaggctgctcggtttcacaactgctgagggagacttgggctccatctcaggtctgccccatgtcgccctcaacctccagccaccggtcctccgtgtcccccatggccaggcacggcttgcagacatctgtcgttggctcctctcagccgtcgtgggctgaccctggcacgtcctcctgtggctgagcccagtggggacagctgcttccttttattaccctagaactctcgtctttgatcaggccccctcccctatgccacacagtccctgtcactcgggtgagcccagtagtcatggggaaggcctgcgggttccaaacatccaaaggcttgcgtgcagcatgacagcttgaaaccgatgttttttaccttgatcagatttcagcttggcgggggctttgctcagctttcagtgaggcctgggccgatttcccagcatcccctcctgaggccagcctctgtttcctgtgattttctgcacaaagtgggagggaggagtcttaggaaatggggggccacctcgaaacctaggcctcctctggcttctctgtgccagtgcccccacgctttgtgtctgtgtccccagcccatgggactgtgttattccctgagtgctgccgcatgcccagcccgcactgaggacgtggagccccgaggggcaggatggcctccatggtcacacgtaggaagtggcctccaccctccgatgatcctctccccccctccctttcagcgccttccccgggggtgtcatcagccctcctgcctgtgctttgtcccgtcttctgcaggcgcatgggacgtgctgacaggtcctctgccgggttcctgccttgctatgcgcacgctggtcaccacagaggcctggcccttcttctgtagcagtcccacacccgcaacaggtgtggctgctgaccacctgctttctgcccctctggtcctgaggagggcgcagtgggcactcaggcgtggctgagcagatgtgtgttgccgggaggaggaaggactgctccagtcagggctgaatttcccacccggagcatttctgctgtatttggtgtagcgcctgctgcttaaagctctgattcccagttggcaccctttcccttctgcattgaaaaacatacggatgcatgtcttcttgcagtgaatgtgtattctcccagcctctcttctgggttggggctggaggtggagcggcacacaggagccgcagcgatggaggatgtgcgggtgcagcaccccgtacagcagggatgccaaacccgcgctgagtccctctcaacttctgctttgaagcccagtcacgccattgcctgggttttgctgggcggggctgcatgtgatgttctcctctgtccctcccccagagccgcccacctgctccccggaccagtttgcatgtgccacaggggagatcgactgtatccccggggcctggcgctgtgacggctttcccgagtgcgatgaccagagcgacgaggagggctgccccgtgtgctccgccgcccagttcccctgcgcgcggggtcagtgtgtggacctgcgcctgcgctgcgacggcgaggcagactgtcaggaccgctcagacgaggtggactgtgacggtgaggccctccccgtcaaggctctgccaagaccctggccctgccctccgggatacgagcttggggctgcctccggcctcacaggagtaggggctctgaaaacctttgcttgcagggagattgccaagtctgtcttttaggcccaacaaggaaaactctgcagttccacccatcctgtcccaccaggtagtgtggcttgaaggcagactgtgagggtctatctcaccttcctgcattaggtcaggagtttcacagaaacctgaggcacattcaggggtgggctgcagaggtccatggctcacaccctggaaaatccgcccccaaaagacagtgctgtctccactgaccagtctgtgggatagtgcttaagcctgagtggtttctatcaacatgtagaatcaggaggtataaagagatttgctcaggcatcctgggccctctctgaccagcaggatcttcctttagatcttgacagtgaaacacatctcttctgtgccccctgtgagttttctttcattcattcattcattcattcattcattcattcattcgagacagagtcttgctctgtcacccaggctggagtgccctggtgtaatctcggctcactgcaacctctgcctccagggttcaatcgattctcctgcctcagcctcccgagtagctgggatgacaggtgcgcaccaccatgcctggctaatttttgtatttttagtagagacagggtttcaccatgttggccaggctggtctcgaactcctgacctcaggtgatccgcccgcctcagcctcccaaagtgctgggattacaggcatgagccaccgcgcccggcctgagttttccttttatgaaggacctgcttggttggttgcctgccacatgttgtcagcaccatgggcccaggactgctgaggagctgttgatgccctcgctctcccagagccaccggctctgttagataattcacatgcagtctggccactgtcctacgtcctcattcacaaagagcagacatttcgtagaagatgagggcctgggagtaacctccctgcatgtttttctataaaggcatagtggttaagtccttccagctcattgaccattggagaattttatggaggctgtagactaggggctggtaaactaagggcccaggggccaaatccagcctgccacctacttttgtaaataaagttttcttggtgcacagccatgcccattcattcatttgcacaatgtctgtggctgctttcatgccaaaagcaggagaactgagtggttatgctggagacctacggccttcaaagccccagacctcacgtctggcccttgacagacagagcttccccagccctgctgcgcatcctggcccagcatgtgctgtgtgtgtgatttcagcttgcaggagccgtggttaggaattgtccctgtgttggtccattttgcattgctatgaaggagcacctgaggccgggtagattatgaaggaaagaggtctgtctggctcatggttctgtaggcagcaccagtatggcacccgcatctgctcagcttctagtgaggtctcaggaagctttgactcatggtggaagtcgaagcgggagcaggtgcatcacatggtgagagagggagcaacggagagagagagagagagagagagagcgcctctccctcttgccctcaccttgagaggagatgccaggctcctttaagtaaccagctcccatgtgaactcacagtgagagcccatttgctactgcggagagggcaccaggcatctgctcccatgacccaaacactgcccaccaggccctacctccaaccttggggtcatattttattctgttctatgctatgctatgctatgccatgccatgccatgccatgctattcctattctattatttgagacagaatctcgctctgttgcccaggctggagtgcagtggcatgatcttggctcactgcaacctccacctcccaggttcaagcgattctcctgcctcagcctcccgagtagctgggattacaggcacacaccaccacacccgggtaatttttgtattttcaatagagatggggtttcaccatgttggccaggctggtctcaaactcctggcctcaagtgatccacttacctcggcctcccaaagtgccatgattacagatgtgagtcactgcgcccagtgagggtcacatttccgttgagatttggaggggcagacgttggagccatctgagccccctcgtcccgctctagcttctcctcccgtgtgccccgcggtgctggtggcaggcccttacgccggttctggctgcacgctctgttccagaagctttcttccctgcttggttaccagaaaatcatcccatccattacaaggacagggtccccttatctcccattcccagggcaggacaccgggggcagggcaggtggggaactgagcaagttctctgggggcaggcgtggctatggctccctctgggtgggcgtctggggaggggtggaggcagccgtcagcgccctggcttgctcttcctccctggccagagactgtggccttgtgctgctcccgtgtgggctgcctgcacctccagtgggttgtgctccctcccctcccctcccctcaagctctgctgagcaccactgccttccacagcccccactctcgggaggcgaggctcctcgtggccattcctgtccttggcacccacccccccaccaacctggtagagccttgggcggggtctgttactccttgcatggcgtagacctccccacagtaggcacctgacacatacctcctggggggcaggcaggaggtgcgttgaggtctcagccctggcagtccctcccctgcgtggcataggcctcgccacagggtcatcgagggtgggtggagactgtactagaccactccccgctggtcctagaaagggtcccatctgtctgctctctgtttggagtccagaccttggttgctgtgccctgcatggtgggctggggggcaccctccagcctctctgagtgcatggcctctccttgcagccatctgcctgcccaaccagttccggtgtgcgagcggccagtgtgtcctcatcaaacagcagtgcgactccttccccgactgtatcgacggctccgacgagctcatgtgtggtgagccagcttctggcacggggaaggggcgtccgggctgggttcccccaggaacgtggagtttaggggaggagacgtgcctttccagcggggctgggggctgtgtgggagactcaggcggctgggaggctccttgcgggaggcagggaagcctttcccagggcagcggccaggaggacagactgtgagctgtgggctcggcggctacagagtctgcctcagtgggcggggctgatggtgtccaggtgcctgcagcacgcacccacccacgggaccttgctgagcagcgtctgtcaggcagcaagattacccgagggctgcagtggtcctgttccctggcagcttactgtctggctgaggaggagtgatgttcacatatgcacacatgtcatgtgcacacacatgtacatgacaacatcccacatgctcctcaaatagcatgacctgtacagtcacggatatagggcctaggggataggaggccaagacagtcagggaagactttccagaggcagtggctcctgaaaggctgtctgattcaggcaggaagggagctgagttcagataggaagtagcaatgagtcattgtgtctggggacatggccactccttcgctgcagagggacctgggctgagagctcctctcttatggctgcagtcgggagagaagtctgttggggggagaagggggcttcctcaagggactccctgtgccctttggcaccttcgtgccaggtcaggcttgaggcctgaaggcagtggtgggggccaccaagggtcgcctcctctgctgggcaagttcccagtctgacgggcctgtgccgtgggccccagctgtgggggcgctgttgatgcgcagccaggcctcgccgccagagcccgcacgcttccattccgctgacttcatcgacgccctcaggatcgctgggccggccctgtgggagagtgaatgtggcttttgccaaagttgagtctggagcctggaaacttccctatgggcagccttgatagtggagtggcccaaggagcccacccagccgaccctgcccctcccgtggctggtgggcggcaccaggggctgcctggctttgctcgttcaccaacatcacccgggctggccagggcgcgctcacttctgccaccaccgagggccctgggcgaaggagtgaataccaggctgccttggcagggatgtgttgagggctgtggggagtcggacagcggcgggggtcagaggaggaggagggtgcaccgtgcaggctgaagggccacgttaccctgaggttggccaggctccccaggcctagcctcccagctcccccactttctccccaccctccaccagtggcaaagccagccccttcagggcgcacggtgtctgcccccaaggagggcccattccgttggggttaatgttggccacctctttctgtttgtctctggcagaaatcaccaagccgccctcagacgacagcccggcccacagcagtgccatcgggcccgtcattggcatcatcctctctctcttcgtcatgggtggtgtctattttgtgtgccagcgcgtggtgtgccagcgctatgcgggggccaacgggcccttcccgcacgagtatgtcagcgggaccccgcacgtgcccctcaatttcatagccccgggcggttcccagcatggccccttcacaggtaaggagcctgagatatggaatgatctggaggaggcaggagagtagtctgggcagctttggggagtggagcagggatgtgctaccccaggccctcttgcacatgtggcagacattgctaatcgatcacagcattcagcctttcccactgagcctgtgcttggcatcagaatccttcaacacagaggcctgcatggctgtagcaacccaccctttggcactgtaggtgtggagaaagctccttggacttgaccttcatattctagtaggacatgtgctgtgttgtccacaaatcctcatgtaccctagaaatgaatgtgggggcggctgggctctctccagagctgaaggaatcactctgtaccatacagcagctttgtcttgagtgcagctgggatttgtggctgagcagttacaattcctacgtggcccaggcaccaggaacgcaggctgtgtttgtagatggctgggcagccgcaccgcagagctgcaccatgctggtttgtatcacatgggtgaccatggtatgtctaagaaggtggagtccctgtgaggtctgcaggtgcccccacagctccaggccaccttgaggattgcctctgcctgcccagccctgagttccctctcccctgtcctgtcccactgtcaccccaagccggcctcattgggagcctgttggatggcagggtatagatgtaacctgattctctctggggagcggggttatctggcttctcaagagctcctaggagcccacagtggtggcaccatcacagtcgcagcagcccccagagaacgcggccctgtctgttcctggcgtgctctgtgctgccccgcctgggttccctgccccagtcgcaggccccttggaggaggtaccatgtgtctcccgtttcacagatgagccccggggagctcactctagtagtggccagagaggcctgcggctcagggagcggggcacatttccaacaggacacaccgccctggtctgagtctcgtgggtagtgggagcagaggagagcgccctatgtctgtggggcggcttggctgagcctggaagccacctgacctcccccgtcccttccctgccaggcatcgcatgcggaaagtccatgatgagctccgtgagcctgatggggggccggggcggggtgcccctctacgaccggaaccacgtcacaggggcctcgtccagcagctcgtccagcacgaaggccacgctgtacccgccggtgaggggcggggccggggaggggcggggcgggatggggctgtgggcccctcccaccgtcagtgctggccaccggaggcttcccgggttcctgggggctgtgccaccgcctctgaggcatgcttgctttcttcccttttcaaacccttctgcttccttctttaatgacattgttgattgtggataatctgaaaactacacaaaaatataaagagccaaaatctcacccaaatccacctcctagagtggctgttgggctccgtcagcatccaggcggccgtctgtgttccgcacggcccagcccatcgatagccgcctgcaccaggcctgtctgccctctgtgagcctccccacagggttccctccacaaacaccctgttctcccacccagggctggctgcttcctggaaaacagctggatggttttgtgcatgacagacaaacacagggtgattttcgtggctaaaatactccctggagcttttggcagggtgaggggctggctccagctgagccacgccttgagtgaaatgactgtgaggagaataaactgccgctgccctccaggatcactggggctggctggggagaacccccgtttctgggagcacagtcccaggatgccaaggcgagcttggtgccgagatgtgaactcctgagtgtaaacagcgggggctgacttgacatgctttgtatgcttttcatttgttcctgcagctgtatgcccctaaggtgagtccagcccccttctgcttcctctggggcctcgccagtgagccccaccttgctggggctggttcctcctgcccttctgggtatccctcacatctggggtcttgtcttcttgttttatttttcttttttttttgagacggagtttcacttttgttgcccaggcttcagtgcaatggtgtgatctctaggctcaccgcaacctctgcctcccaggttcaagcagttctcctgcctcagcctccctagtagctgggattacaggcatgtgccaccacgcccagctaattttgtatttttagtagagatggggtttctccatgttggtcaggctgatcttgaactccctacctcaggtgatccgcccaccttggcctcccaaagtgctgggattacaggcgtgagccaccgcacctggcctttttcttttcttttcttttcttttttctgagacagggtctcgctctgtcacccaggctggagtgcaatggtgtcatcatggctaactgcagcctctaccttctaggctcaagcaatcctcccatctcagcccctaagtagctaggactgcacgcatgcatccccatgcccagctaatatttacattttttgtagagatgaagtttcactatattgcccaggctggtctccaactcctggactcgagcgatcctcctgcctcggcctccccaggtgctgggattacaggcgtgagccaccgtgcctggcctggggtattgtcttcttatggcacctgactgtggtgggccctgggaaggaagtagcagaagagggttcttcttggtttcctggacagtaactgagtgttctggaggccccagggcctggctttgtttagggacaaagggaactggtaaccagaagccgagagtttaaacacccactgcccttcttccctgctcctgctgctgcaacccagcttaaccagccaggagtgctaggaacccaagcagggcccccgagcacacagcaggcagctcacgaattctcttttcctgttctcccttgggagctgggaggatcttaatcaggcaataagagatggcactgagcagccagctaattttttaaatcactttattgtttaaccatatgactcacccacttaaaaaagggtacagttcagtgggttttagtgtattcacagatgtgtgcaaccctcaccacagttaattttagaacattttcctgcccctaaaagaaactctgcatgaagccagctgtttttaaattagcaaagttattttgcatcctttaaatatatgttcatggtacaaaattcaaaagatacagaagagtctgcagtccaaagagactccgcccccatgacgccaagcaggactccctgggaggcatggcctcctgcagtgtgtttcttctatgtccccccaggggtcatctgtacatatgcaagcatacaagagcgtggactttgttttccaagccagaagataattgtagatttatgtgcagttgtgagaaagagcacagacccatttatcctctgcctggtttcccccagtgctgcctgccatcttgcatgacttccattcctatcataagcaagacactgataacgattctttcaccttattcagattgacataagtgttttttgtttgttcttgagacaaacttcctctgtcacccagtgggagtgcagtggcacaatcacagctcactgcagcctcaaactcctgggctcaagcgattctcctgcctcagtcccctcaagtagctcagatggcaggtgtgcaccatcatgccaggctaatttttaaattttttgtggaggtgaggcctcactaaatttcctgggctagtcttgaactcctgagctaaagtgatcctcctgcctcagcctcccaaagtggtaggattacaggcatgagccactgcgcctgggctgacatatgtgttttcgtaagcccgaaagatagcatctgaagagtcaacattgagccttgccttttgctgctaatgatgtataaaagctgctgttctgagcatttcggaggctcccagctgccgtgtgcaccctgcctagagctctaccgtaacccatctccgggaggaggtgctattgttttcctcattttgcaacaaggaggctgaagaactgagcatgaaccactggcctgggtcgttcggttggtaggcagtggggccaggccatccaactcacaaccaccttctactctgcttcccccgcaccctgaagtttgttctgttttgaggacacagccgtcacattcttggtggctgaacagcactccttgtcaggtgtggctgggcccccactggagggcatcatggtcctctctcctgctgcggttgaaccttggctgtttcaaccactcctgccaagtggccctctgaaagggacagtccatcttttctcagcagagggccacactggcaaaacggtccctggcaccctttctctccacctgtctaatatagagtaaaaatggtatcatgttaagatcttcatttatatttattttatcatgaatgatgtaagcatcattttgtgtgtttaagaacctttgggcccagcgtgatggcttgcagctgtaatctcagcactttaggaggctgagatgagcggatcacttgaggccgggagtttgagaccagcctggccaacatggagaaaccccgtctctagtaaaaatttaaaaattagccgggtatggtgatcccagctacttgggagtctgaagcatgagaattgcttgaacatgggaggcggaggttgcagtgagccgagatcgcgccattgcactccagcctgggcgacagagcgagactctgtctcacaaaaaaaaaaaaaaaagaaaagaaaagaaattatcaatctcctcttttatggcatatatatatatatatatatatatatatatttatttccctttcttggttatgttcataaaggcctcccctgctctgatcataaaaaacaacttattttcacactctctctcttttttttttgagacagagttttgctcctgttgcccaggctggagtgcagtggcgcaatctcagctcactgtaacctccgcctcccgggttggagtgattctcctgccttaccttcccgagtagctgggattataggcatgcaccaccatgcctggctaattttgtacttttagtagagacgggggtttctccatgttggtcaggctggtctcgaactcgcgacctcaggtgatccacccacctcggcctcccaaagtgctgggattacagacgtgagccaccatgcccagcccacactctctttcttaacgtcctcctcctttcgttttacgttcacatctttaattcttctgggatgtaattagatttgatgagcaaggtgggcatccagcttgtttcttggctgatggcttatgggtggcgtgaattagtcggggtctatcaggaggcagaaactctatgagaatttgaacagagaaagttccgtctacaggcttattaccagggactggaatagcagaaattgaacagtgagatgtacagagaactctaagaatgcaggaataggccaggcatggtggctcacacctgtcatcccagcactttgggagaccaaggcgggtggatcacctgaggtcaggagttcgagaccagcctggccaacatagtgaaaccccatctctactaaaaatacaaaaaaattagctgggtgtggtggcgcatgcctgtaatcccagcttctcgggagtctgaggctggagaatcacttgaacctgggaggcagaggttgtagtgagccgagatcatgccattgtactccagcctgggcaacaagagcgagactcagtcaaaacaacaacaacgcaggaatagcagatgagccgaggtggggcctccccagcccccaccccccaccccgcaccctgggccgagatccagtcctctttgaatagggcctgggcgtggttcacgggacatctgagacattgccgaggcgctgcactggtggatcttgccagaagtctgcccagtgcagatttgggcagaatctcaaactgccttgggatgtaggagagaaaccaggcctggtcaagttcatgggaagaggtggaaacagaccccataggctggggcttgggcagctgtaggaagccctctctgctgcctccctgcctgctctctgctttgaagcatcttccccagtgcccccagtctcatgccctctcaacgttggggtcaaatcctgaggaatacccagactggctctctgggccaaagaggaccctctccagaaagagcagggcccagtgcggcttcctaaagggcaggggaagggcctggccactccccagaggctactcaccagccatcaggatagccccaggaagcaggccttctcgagcccattttattactttattttattattttatttaattttaaatttattttttgagacagagtctcactctgttgcccaggctggagtgcagtggtgcgatctcaacccactgcagcctctgcctccagggttcaagggattctcccacctcagcctcccaagtagctgggattacaggtgcccgccaccacacccggctaattttcatatttttagtagagacgaggtttcaccatgttggccaggctggtctcgaactcctgacctcaagtgatccgcccgcctcggcctcccaaagtgctaggtcaagcccattttaaagttgaagaaactgaggctgaggtaaattccctccccagggatcctgctgcagccagaaggtggtaaaacaggacttcacccgggtctgtctggcgtgaaaggcagtgttcttgtaccaccctagggggcctgagagaactgagtccctcgggcataactgacagttctgttcccattattccgcaggggctcggatctggctgtatgctttccaggatggccttggagacccacataagccctacaccctttgggaagctgcatgttgggttggggtgccgtcagtggcacttgtggaaggtgcagacctgtgtgggtgtgtgggcccagggcccctggtcccttcctccctttgtagggctggttgtgtgctgcctggacctggggggcacgttcacgtggtgaatttgtctatttactatccccgctttggggctggtgccagcacaggcccttgtgaagggggtgcctttgtctggagtgggactgtggcccctccctcagcgtggtgacttctgtgtcagggcttcagcagggacgcagagcccctgagtgttcggaacaagggcgtcattgcaggagttagactgtgtgtgatggagggaggaggggcaggaggaaaggtcagaaggagagttcctgggaaggtccctgaggagcctggtgaggtgctaactggtgtggaggacactcagggcctgtggggacatctcctactgctgggggccagccacaaagggaactggccgaagtcctgtccccgccttcacagcccagcatctggtcacaaggcaggtacttggaagggcgcgggcacctgggccaaaagtgcctgggttccctttgcctttcactgagatgaccttcggggcaggtggctgctgcctcccctcctgtccccaggttttgccaactggccagaggaaggggtcctgggaagcaggggggccagaagccctctctgcaaggaaagcccgaggggtgtgggaggaaggaaggaatgcccaggctggcgaggctctaagtcaccctggcttggctctcctcagatcctgaacccgccgccctccccggccacggacccctccctgtacaacatggacatgttctactcttcaaacattccggccactgcgagaccgtacaggtaggacatcccctgcagccctccatggccattgggttcccgccagcccgtggtggaggggcctaatccccatgccactgatgaggggaggtattctgggtgctagtgggcaggtgccgggcccagccctgcctccctctgctctgccaaccacactaggctgcctccccagacaagctcagcgggcactgcatgttgggttcagaaatcagcagaactccacgttctgagctgctcttcaagttgctcctatgggggttacttttaagctgggaaatggctgtggcgtcgaggggccgggggcttgggctccaaactctgactgtgtgtttgagtccggctgtggaaacctagccattgagatgccccctcttggtggctctgtcctcttaggatgggacaagtctgtgaaggctgctgcagcacccaccgtagacccctaatcgtgtgacgtcaccaggatggtccgggctgctcacttgccacagtggcctgtttgagcccgggaagccaacggggctgctcagctggacaccagccccccgagctgcccatgttggggtcacaggccccacctccctggttggggaggggcaactgagagtgtggagaggtgggacccaggtgtgctggtctccgcaggggctggatcagagcctgggatgggcagggtgagcctcctgacctttaacccagtggtgtcaggcaacgtggcccacccgccagccgcaccaggccccacccccgcaggtgaaggggtgggataggctgggcctgggccaggacacctctggaccacgcattcctcattgcttgggtccctggagcagcagggcctcccgagtgtggtgccgcctgccacctagtggccatttccacgaactcccaggcctggctggggagccggaactgcagcctccatttccaccccactccgggtcgggccacctccctgatgcctcagtattatatcaaactgtcacagtctgtcccacagccttacagaccactgtctccagaatggtcacatccacactgggcagcccagtctcgctagttcctcgtcccacctcctgcctttgctcatgcccgtcctgctctgggcccaccgcggacacatcttccccccgcccgccgtctgacctcacagcagctgggccccaagaggagtatcctgtcctgctgcacttttctcaacacccggtgttggctgcaccttcccacccattgcaggcccctctgtgacaggacgggggctcctaaacacaccacagttccgagtctgaactcacacagtgggatgcggcgtttctgggccacagttgggtgcaggtagcctctgggaggatgggaggtcaggagccatcttgcgagtcaggttgcttgaactcaggatggaagtgttccgggcccattggttgctgtattagcctgttctcacgctgctaataaagacatacccaagactgggtaattgtaaaggaaagaggtttaacggactcacagttccacctgcctggggtggcctcacaatcatggtagaagacaaggaggagcaagtcacatcttacatggcttcagggaacagacagcatgagaaccaagcgaaaggggtttccccttgtaaaaccatcaagtctagtgagatttattcactaccacgagaacagtatggggggaaccacccccatgattcaatcatctcccactgggtccctcccacagcacgtgggaattatgggagtacaattcaagatgagatttgggtggggacacagccaaaccctatcggttgccaacatttacagtaacagtgttaggtgaacagttgtccagtctcctgttttgtcggacactgtttctagcaccttccaggcagaatctcatgtatccttcactttcgaaatgggtactatttcatccccacttttatcaatgagaaactaaagctcgaagaggtcaagtaagttcctggccaaggtcagctagcaggctctagaggcctcgttctccttagaggcagccttgccagggcccaggcttggcaggctgcagggcaggtgcgggcatgcccatggtagaggtgggaccattgaggctcagagagggtaagtgatgagccctggcgacacagcggggtgggtccagagtccggcctgcatcttctggagctggccagtggacaggcctttcccgttcacagccccggggctgctgtgcccaccagggcggatgtgcctaccgaatcccactcctctgtgtgtgtccctttcaggccctacatcattcgaggaatggcgcccccgacgacgccctgcagcaccgacgtgtgtgacagcgactacagcgccagccgctggaaggccagcaagtactacctggatttgaactcggactcagacccctatccacccccacccacgccccacagccagtacctgtcggcggaggacagctgcccgccctcgcccgccaccgagaggagctacttccatctcttcccgccccctccgtccccctgcacggactcatcctgacctcggccgggccactctggcttctctgtgcccctgtaaatagttttaaatatgaacaaagaaaaaaatatattttatgatttaaaaaataaatataattgggattttaaaaacatgagaaatgtgaactgtgatggggtgggcagggctgggagaactttgtacagtggagaaatatttataaacttaattttgtaaaacagaactgccattcttttgtgccctgtgtgcatttgagttgtgtgtccccgtggagggaatgccgacccccggaccaccatgagagtcctcctgcacccgggcgtccctctgtccggctcctgcagggaagggctggggccttgggcagaggtggatatctcccctgggatgcatccctgagctgcaggccgggccggctttatgtgcgtgtggcctgtgccgtcagaaagggccctgggcttcatcacgctgttgctgttcgtcttcctcagattcttagtcttttttttttttttttttttttgagacggagtctttctctgtcatccaggctggagtgcagtggtacaatctcagctcactgcaagctccgactcccaggttcaagtgagtctcctgcctcagcctcccgagtagctgggactacaggtgcgcgccaccacacccgcccagctaatttttgtatttttagtagagatggggtttcaccatgttggccaggatgatctcgatctcttgacctcgtgatccgcccacctcggcctcccaaagtgctgggattataggcatgagccactgtacccagctgactcttagtcacttttaagaaggggactgtgccttcatttttcactgggccctgcagaatatatgcctgggctctgggctcttctgaacctgtgttggcttccatctgacctctctgtgccagcccaaggctgctgctcttcctgagggcaaggagccccatgactgcgtgttgactcgctggatggggctgctgagcccactctgccacaccacgtgcccctggcagggagggaatccctgggtcctcacaggaacagtcagcaagccacacctgacgcctgctgtgggcccatccctgcggtgctggagaagacagacaaggcctggtcactgcctctgcagggtccccagtccgtggaaggagacagtaatctaggcattttcggtggggaagctgagctgttctcgtgtcctgaaggccaggcgggaacagccgtcttcagagggaagggagaaaatgcacatcgcatcagtggagaagggcctgacttccctcagcatggtggagggaggtcagaaaacagtcaagcttgagtattctatagtgtcacctaaata

SEQ ID NO: 10 - DNA, 8705 bp, Homo sapiens
ggactcaggggcagcagggaggtacacccatggttagtgggcggaccatagggggtaatgagagggtgaatcgatggaacctgggggacacaatcgaagtggttccagagtcgggctgtactaattaaagagacggggcagtggacaggcattttcagttgactgcccagggagtgttctgcccaacagggaggatatgcgtacagaatcatactcgatcagcatgagtccaattcagaccgtacatcagtggagatatgggtcccccgatgactccgtggaacactgatgtttgtgacaggggagtacagcaccagccatcagcaggccagtaaatcataccggcctgcgaaattggactcagacccggatccaccctgaccgacgtcccaagcccccaccccccaccccccaccatgggccgagatccagtcctctttgaatagggcctggccgtggttcacgggacatctgagacattgccgaggcgctgcattggtggatcttgccagaagtttgcccagtgcagatttgggcagaatctcaaactgccttgggatgtaggagagaaaccaggcctggtcaagttcatgggaagaggtggaaacagaccccataggctggggcttgggcagctgtaggaagccctctctgctgcctccctgcctgctctctgctttgaagcatcttccccagtgcccccagtctcatgccctctcaacgttggggtcaaatcctgaggaatacccagactggctctctgggccaaagaggaccctctccagaaagagcagggcccagtgcggcttcctaaagggcaggggaagggcctggccactccccagaggctactcaccagccatcaggatagccccaggaagcaggccttctcgagcccattttattactttattttattattttatttaattttaaatttattttttgagacagagtctcactctgttgcccaggctggagtgcagtggtgcgatctcaacccactgcagcctctgcctccagggttcaagggattctcccacctcagcctcccaagtagctgggattacaggtgcccgccaccacacccggctaattttcatatttttagtagagatgaggtttcaccatgttggccaggctggtctcgaactcctgacctcaagtgatccgcccgcctcggcctcccaaagtgctaggtcaagcccattttaaagttgaagaaactgaggctgaggtaaattccctccccagggatcctgctgcagccagaaggtggtaaaacaggacttcacccgggtctgtctggcgtgaaaggcagtgttcttgtaccaccctagggggcctgagagaactgagtccctcgggcataactgacagttctgttcccattattccgcaggggctcggatctggctgtatgctttccaggatggccttggagacccacataagccctacaccctttgggaagctgcatgttgggttggggtgccgtcagtggcacttgtggaaggtgcagacctgtgtgggtgtgtgggcccagggcccctggtcccttcctccctttgtagggctggttgtgtgctgcctggacctggggggcacgttcacgtggtgaatttgtctatttactatccccgctttggggctggtgccagcacaggcccttgtgaagggggtgcctttgtctggagtgggactgtggcccctccctcagcgtggtgacttctgtgtcagggcttcagcagggacgcagagcccctgagtgttcggaacaagggcgtcattgcaggagttagactgtgtgtgatggagggaggaggggcaggaggaaaggtcagaaggagagttcctgggaaggtccctgaggagcctggtgaggtgctaactggtgtggaggacactcagggcctgtggggacatctcctactgctgggggccagccacaaagggaactggccgaagtcctgtccccgccttcacagcccagcatctggtcacaaggcaggtacttggaagggcgcgggcacctgggccaaaagtgcctgggttccctttgcctttcactgagatgaccttcggggcaggtggctgctgcctcccctcctgtccccaggttttgccaactggccagaggaaggggtcctgggaagcaggggggccagaagccctctctgcaaggaaagcccgaggggtgtgggaggaaggaaggaatgcccaggctggcgaggctctaagtcaccctggcttggctctcctcagatcctgaacccgccgccctccccggccacggacccctccctgtacaacatggacatgttctactcttcaaacattccggccactgcgagaccgtacaggtaggacatcccctgcagccctccatggccattgggttcccgccagcccgtggtggaggggcctaatccccatgccactgatgaggggaggtattctgggtgctaatgggcaggtgccgggcccagccctgcctccctctgctctgccaaccacactaggctgcctccccagacaagctcagcgggcactgcatgttgggttcagaaatcagcagaactccacgttctgagctgctcttcaagttgctcctatgggggttacttttaagctgggaaatggctgtggcgtcgaggggccgggggcttgggctccagagtctgactgtgtgtttgagtccggctgtggaaacctagccattgagatgccccctcttggtggctctgtcctcttaggatgggacaagtctgtgaaggctgctgcagcacccaccgtagacccctaatcgtgtgacgtcaccaggatggtccgggctgctcacttgccacagtggcctgtttgagcccgggaagccaacggggctgctcagctggacaccagccccccgagctgcccatgttggggtcacaggccccacctccctggttggggaggggcaactgagagtgtggagaggtgggacccaggtgtgctggtctccgcaggggctggatcagagcctgggatgggcagggtgagcctcctgacctttaacccagtggtgtcaggcaacgtggcccacccgccagccgcaccaggccccacccccgcaggtgaaggggtgggataggctgggcctgggccaggacacctctggaccacgcattcctcattgcttgggtccctggagcagcagggcctcccgagtgtggtgccgcctgccacctagtggccatttccacgaactcccaggcctggctggggagccggaactgcagcctccatttccaccccactccgggtcgggccacctccctgatgcctcagtattatatcaaactgtcacagtctgtcccacagccttacagaccactgtctccagaatggtcacatccacactgggcagcccagtctcgctagttcctcgtcccacctcctgcctttgctcatgcccgtcctgctctgggcccaccgcggacacatcttccccccgcccgccgtctgacctcacagcagctgggccccaagaggagtatcctgtcctgctgcacttttctcaacacccggtgttggctgcaccttcccacccattgcaggcccctctgtgacaggacgggggctcctaaacacaccacagttccgagtctgaactcacacagtgggatgcggcgtttctgggccacagttgggtgcaggtagcctctgggaggatgggaggtcaggagccatcttgcgagtcaggttgcttgaactcaggatggaagtgttccgggcccattggttgctgtattagcctgttctcacgctgctaataaagacatacccaagactgggtaattgtaaaggaaagaggtttaacggactcacagttccacctgcctggggtggcctcacaatcatggtagaagacaaggaggagcaagtcacatcttacatggcttcagggaacagacagcatgagaaccaagcgaaaggggtttccccttgtaaaaccatcaagtctagtgagatttattcactaccacgagaacagtatggggggaaccacccccatgattcaatcatctcccactgggtccctcccacagcacgtgggaattatgggagtacaattcaagatgagatttgggtggggacacagccaaaccctatcggttgccaacatttacagtaacagtgttaggtgaacagttgtccagtctcctgttttgtcggacactgtttctagcaccttccaggcagaatctcatgtatccttcactttcgaaatgggtactatttcatccccacttttatcaatgagaaactaaagctcgaagaggtcaagtaagttcctggccaaggtcagctagcaggctctagaggcctcgttctccttagaggcagccttgccagggcccaggcttggcaggctgcagggcaggtgcgggcatgcccatggtagaggtgggaccattgaggctcagagagggtaagtgatgagccctggcgacacagcggggtgggtccagagtccggcctgcatcttctggagctggccagtggacaggcctttcccgttcacagccccggggctgctgtgcccaccagggcggatgtgcctaccgaatcccactcctctgtgtgtgtccctttcaggccctacatcattcgaggaatggcgcccccgacgacgccctgcagcaccgacgtgtgtgacagcgactacagcgccagccgctggaaggccagcaagtactacctggatttgaactcggactcagacccctatccacccccacccacgccccacagccagtacctgtcggcggaggacagctgcccgccctcgcccgccaccgagaggagctacttccatctcttcccgccccctccgtccccctgcacggactcatcctgacctcggccgggccactctggcttctctgtgcccctgtaaatagttttaaatatgaacaaagaaaaaaatatattttatgatttaaaaaataaatataattgggattttaaaaacatgagaaatgtgaactgtgatggggtgggcagggctgggagaactttgtacagtggagaaatatttataaacttaattttgtaaaacagaactgccattctttcgtgccctgtgtgcatttgagttgtgtgtccccgtggagggaatgccgacccccggaccaccatgagagtcctcctgcacccgggcgtccctctgtccggctcctgcagggaagggctggggccttgggcagaggtggatatctcccctgggatgcatccctgagctgcaggccgggccggctttatgtgcgtgtggcctgtgccgtcagaaagggccctgggcttcatcacgctgttgctgttcgtcttcctcagattcttagtctttttttttttttttttttttttgagacggagtctttctctgtcatccaggctggagtgcagtggtacaatctcagctcactgcaagctccgactcccaggttcaagtgagtctcctgcctcagcctcccgagtagctgggactacaggtgcgcgccaccacacccgcccagctaatttttgtatttttagtagagatggggtttcaccatgttggccaggatgatctcgatctcttgacctcgtgatccgcccacctcggcctcccaaagtgctgggattataggcatgagccactgtacccagctgactcttagtcacttttaagaaggggactgtgccttcatttttcactgggccctgcagaatatatgcctgggctctgggctcttctgaacctgtgttggcttccatctgacctctctgtgccagcccaaggctgctgctcttcctgagggcaaggagccccatgactgcgtgttgactcgctggatggggctgctgagcccactctgccacaccacgtgcccctggcagggagggaatccctgggtcctcacaggaacagtcagcaagccacacctgacgcctgctgtgggcccatccctgcggtgctggagaagacagacaaggcctggtcactgcctctgcagggtccccagtccgtggaaggagacagtaatctaggcattttcggtggggaagctgagctgttctcgtgtcctgaaggccaggcgggaacagccgtcttcagagggaagggagaaaatgcacatcgcatcagtggagaagggcctgacttccctcagcatggtggagggaggtcagaaaacagtcaagcttgttgctgggtgacagtgcatttaataatcaaaatataggctgggtacggtggctcatgcctgtaatcccagcactttgggaggctgaggcaggtggatcacttgaggccaggagtttgagaccggcctggccaacatggcaaaacctcaactactaaaatacaaaaactagccgggcgtggtggtgcacgcctgtaatcccagctacttgggaggctgaggcaggagaattgcttgaacctgggaggcggaggctgcagtgagccgagattgtgccactgcactccagcctgggcaacagagcaagactctgtctcaaaaaaaaaaaaaaaaaaagcaatacaaaatacaaatatcactttcactaaaagaagggatggaagacccaaaacaaacagaaaacaacaaaatggcaggagtaagtccccacttatcaataataacattgactgtaaataggctaagctctgcaatcaaaagagtgggccaggagcggtggctcacgcctgtaattccaacgctttgggaggctgaggcggatggatcatttgatgtcacgagttttaagaccagcctggccaacaaggtgaaaccccatctgtactaaaaatacaaaaattagccaggcggtagtggcacgcacctgtaatcccagctacttgtgaggctgaggcaggagaatcactggaggctgggaagcggaggttgctgtgagccaagatggagccactgcactcccacctgggcgacagagtgagatcctgtcttaagaaaaaaaagagtggatgaatggatcaaaaaacaagacccaaccatctcttgcatacaagaaacacactttacctataaaaacacactaggccaggtgtggtggctcacacctgtaatcccagccctttgggaggcctgactggcagatcacctgaggccaggagtttcagaccagcttgaccgacatggcaaaaccccatctctcctaaaaatacaaaaaaacaaaaaaaagaaaaaggctggaagtagtgatgtgtgcctgtagccccagctacttgggaggctgaggcaggagaattgcttgaatccgggaagtggaggttgcagtgagccaggatggtgccactgcactccagcctgggtgacagagcgagaccctgtcataaaaaaaaaaagaaaagaaaagaaaaacgagaaaaacaaacacaaaattagtagaagaaaagaaataataaagatcagaacaggccaggctcatgggcacagtggctcaactcctacctgctcaggagtttgagaccagtctggccaacatggcaaaaccccatctctcctaaaaatatgaaaaaaaaaaaataggctggatgtggtgatgtgtgtgtgcctgtagccccagctacttgggaggctgaggtgggagaatcacttgagcccaggaagtggaggctgcagcgagtcatgaatgcaccctgcactctagctgggtaactggagtgagattctgtctcaaaaaagcaaagaccagagcagaaataaatgaaatggaaatgaaggaaacaatgcaaaatgatacaaaaagttttttcgaaaagataaacaaaatcaacaaacctttagccagattaagaaaaaaagagagaagacccaaataaataaaatccgagattaaaaaggagacattaccactgataccacagaaattcaaaggatcattagaggcaactatgtgcaactatatgctaatgaactggaaaacctagaagaactgggtaaatttctagacacatacaacctatcaagattgaaccatgaagaaatccaaaacctgaacaggccgggcacggtggcttacgcctgtaatcccagcactttggaaggcctgagatcaggagttcgagaccagcctggccaacatggtgaaaccccatctctactgaaaaaatataaaaattagccgggcgtggtggcgggtgcctctaatgtcagccactcgggaggctgaggcaggaaaatcacttgaacctgggaggcataggttgcagcgagccgaggttgcaccactgcactccagccttggcgacagagccagactccatctcaaaaaaattaaaataacaaaaacctgaacagaccaataacaagtaatgcgatgaaaactgtaataaaatgtttcccaacaaagaaagcccaggaacaaatggcttcactgctgaattttaccaaacatttttttttttttgagacggagtctcgctctgtcgcccaggctggagtgcagtggtgtaacctcggttcgctggtaacttatgcctctcaggctgcaagtgattttcctgcttcaggccccccgagtggctggaaattagatggtacttgtcaaacaaggcctggctaaatttctatatttccttcaagtagaagatgtgcttccaacaaaggttgggttacggctggcttctgaaaatcttggatttcaaggctccccaaaag

SEQ ID NO: 11 - DNA, 66933 bp, Homo sapiens
tataatcaagcgcgttccgtccagtccggtgggaagattttcgatatgcttcgtgatctgctcaagaacgttgatcttaaagggttcgagcctgatgtacgtattttgcttaccaaatacagcaatagtaatggctctcagtccccgtggatggaggagcaaattcgggatgcctggggaagcatggttctaaaaaatgttgtacgtgaaacggatgaagttggtaaaggtcagatccggatgagaactgtttttgaacaggccattgatcaacgctcttcaactggtgcctggagaaatgctctttctatttgggaacctgtctgcaatgaaattttcgatcgtctgattaaaccacgctgggagattagataatgaagcgtgcgcctgttattccaaaacatacgctcaatactcaaccggttgaagatacttcgttatcgacaccagctgccccgatggtggattcgttaattgcgcgcgtaggagtaatggctcgcggtaatgccattactttgcctgtatgtggtcgggatgtgaagtttactcttgaagtgctccggggtgatagtgttgagaagacctctcgggtatggtcaggtaatgaacgtgaccaggagctgcttactgaggacgcactggatgatctcatcccttcttttctactgactggtcaacagacaccggcgttcggtcgaagagtatctggtgtcatagaaattgccgatgggagtcgccgtcgtaaagctgctgcacttaccgaaagtgattatcgtgttctggttggcgagctggatgatgagcagatggctgcattatccagattgggtaacgattatcgcccaacaagtgcttatgaacgtggtcagcgttatgcaagccgattgcagaatgaatttgctggaaatatttctgcgctggctgatgcggaaaatatttcacgtaagattattacccgctgtatcaacaccgccaaattgcctaaatcagttgttgctcttttttctcaccccggtgaactatctgcccggtcaggtgatgcacttcaaaaagcctttacagataaagaggaattacttaagcagcaggcatctaaccttcatgagcagaaaaaagctggggtgatatttgaagctgaagaagttatcactcttttaacttctgtgcttaaaacgtcatctgcatcaagaactagtttaagctcacgacatcagtttgctcctggagcgacagtattgtataagggcgataaaatggtgcttaacctggacaggtctcgtgttccaactgagtgtatagagaaaattgaggccattcttaaggaacttgaaaagccagcaccctgatgcgaccacgttttagtctacgtttatctgtctttacttaatgtcctttgttacaggccagaaagcataactggcctgaatattctctctgggcccactgttccacttgtatcgtcggtctgataatcagactgggaccacggtcccactcgtatcgtcggtctgattattagtctgggaccacggtcccactcgtatcgtcggtctgattattagtctgggaccacggtcccactcgtatcgtcggtctgataatcagactgggaccacggtcccactcgtatcgtcggtctgattattagtctgggaccatggtcccactcgtatcgtcggtctgattattagtctgggaccacggtcccactcgtatcgtcggtctgattattagtctggaaccacggtcccactcgtatcgtcggtctgattattagtctgggaccacggtcccactcgtatcgtcggtctgattattagtctgggaccacgatcccactcgtgttgtcggtctgattatcggtctgggaccacggtcccacttgtattgtcgatcagactatcagcgtgagactacgattccatcaatgcctgtcaagggcaagtattgacatgtcgtcgtaacctgtagaacggagtaacctcggtgtgcggttgtatgcctgctgtggattgctgctgtgtcctgcttatccacaacattttgcgcacggttatgtggacaaaatacctggttacccaggccgtgccggcacgttaaccgggctgcatccgatgcaagtgtgtcgctgtcgacgagctcgcgagctcggacatgaggttgccccgtattcagtgtcgctgatttgtattgtctgaagttgtttttacgttaagttgatgcagatcaattaatacgatacctgcgtcataattgattatttgacgtggtttgatggcctccacgcacgttgtgatatgtagatgataatcattatcactttacgggtcctttccggtgatccgacaggttacggggcggcgacctcgcgggttttcgctatttatgaaaattttccggtttaaggcgtttccgttcttcttcgtcataacttaatgtttttatttaaaataccctctgaaaagaaaggaaacgacaggtgctgaaagcgagctttttggcctctgtcgtttcctttctctgtttttgtccgtggaatgaacaatggaagtccgagctcatcgctaataacttcgtatagcatacattatacgaagttatattcgatgcggccgcaaggggttcgcgtcagcgggtgttggcgggtgtcggggctggcttaactatgcggcatcagagcagattgtactgagagtgcaccatatgcggtgtgaaataccgcacagatgcgtaaggagaaaataccgcatcaggcgccattcgccattcaggctgcgcaactgttgggaagggcgatcggtgcgggcctcttcgctattacgccagctggcgaaagggggatgtgctgcaaggcgattaagttgggtaacgccagggttttcccagtcacgacgttgtaaaacgacggccagtgaattgtaatacgactcactatagggcgaattcgagctcggtacccggggatcctctagagtcgacctgcaggcatgcaagcttctcttgtgccggttgtacgctgtcaggtcacactggtgagttaggcagggcacagatgcccagagcagagggaactttccttggggattcaacacgtgcaagtcttaggggctggcaaatcctgccctcagctagagagggggcttttatttgagaccagaatcacctgagcatcctcctgtccccagctgtgtccagcctgtctgcagggacatcctgagaggaccaggctctcccctcatccacctgcctaagtgccactctgaaccctgtccacctgtgccgtggaggggcgtgacctcaagctgctcagccagcagcaggcttggccctggggggcagcagagacccaggtggctgtggggtgggtgcttcgtggcgtggttctgaaacttcgttggaagtgtgtggacagtgccttgcctgttctctgtgggaccctatttagaaacgaggtctgagttactgggggtcatcactgtgttctgatggcccagctgtgtggaggccgcggtgcagccccatccaaggagccagggccctgggtctagccgtgaccagaatgcatgccccggaggtgtttctcatctcgcacctgtgttgcctggtgtgtcaagtggtcgtgaaactctgtgttagctcttggtgttcctgaaagtgcccccgggtctcaggcctcagaaccagggtttcccttcatctcggtggcctgggagcatctgggcagttgagcaaagagggcgattcacttgaaggatgtgtctggccctgcctaggagccccccggcacggtgctggggcctgaagctgccctcgggtggtggagaggagggagcgatgaagtggcgtcgagctgggcaggaagggtgagcccctgcaaggtgggcatgctggggacgctgagcagcatggccagcagctgggtctgcagcctggtacccggcgggacttgtggttggggctggtttgtggccaggagaggggctggcaggagacaagggggactgtgaggcagctcccacccagcagctgaagcccaatggcctggctgtgtggctctcagctgcgtgcataacctctcagtgcttcagttctctcatttgtaaaatgaggaaacaaacagtgccagcctcccagaggtgtcatgaggatgaacgagtgaccatgtagcatgggctgggtgcgtgtcacctaacatcaccagcctttgcaaggagagccctgggggcctggctgagtatttcccttgcccggcccaccccaggcctagacttgtgcctgctgcaggcccttgacccctgaccccattgcacctgtctccacaggagccgaggaggtgctgctgctggcccggcggacggacctacggaggatctcgctggacacgccggacttcaccgacatcgtgctgcaggtggacgacatccggcacgccattgccatcgactacgacccgctagagggctatgtctactggacagatgacgaggtgcgggccatccgcagggcgtacctggacgggtctggggcgcagacgctggtcaacaccgagatcaacgaccccgatggcatcgcggtcgactgggtggcccgaaacctctactggaccgacacgggcacggaccgcatcgaggtgacgcgcctcaacggcacctcccgcaagatcctggtgtcggaggacctggacgagccccgagccatcgcactgcaccccgtgatggggtaagacgggcgggggctggggcctggagccagggccaggccaagcacaggcgagagggagattgacctggacctgtcattctgggacactgtcttgcatcagaacccggaggagggcttgttaaaacaccggcagctgggccccacccccagagcggtgattcaggagctccagggcggggctgaagacttgggtttctaacaagcaccccagtggtccggtgctgctgctgggtccatgcgtagaaagccctggagacctggagggagccctttgttcccctggcttcagtttcctcatctgtagaatggaacggtccatctgggtgatttccaggatgacagtagtgacagtaagggcagcctctgtgacactgaccacagtacaggccaggcctctttttttctttttttttttttgagatggagtctcactctgtcgcccaggctggagtgcagtggtgtgatctcagctcactacaacctctgcctcctgggctcaagtgattctcctgcctcagcctcctgagtagctgggattacaggtgcctgccactgtgcttggctaatgtttgtatttttggtagagatggggtttcaccgtcttggccaggctggtcgcaaactcctgacctcaggtgatccacctgcctcagcctcccaaagtgctgggattacaggcatgagccaccacgcccggtcaggccaggcctcttttgaacactttgcacaccatgggtcttttcatccaggggggtaggtacagttgtacagttgaggacactgaagcccagagaggctcagggacttgcccagggtcacacagcaggatgtggcaggtgtggggctgggcctggcagcgtggctccagctttccagcatagaaatctgtgaaagcagatagtttgtcggtcggtaggggagactttctgagacccgccccagcggctcagagggtagtagccaggggccttcctgggggctcataacccagaacactgaatgggaaaaccctgatggaggaggcgcagtggagctgtgggtgccgatgggaagtcccagaggagctgggaggtcagtagcggtgctgccctctgtggagcacttagtgggcaccaggtgtgtttccaggttcatggccctgggacctgaagctcagaaggtgaagtaacttgcccagggcacccgtcgggcagcggcgggcagaggatttgtgggctgtggagcctgtgctcgtggcccagccctgggggttgtgagtgtgctggccggggagcttttcctgcaagtggactggtgtctaggagccagcatgtcaggcagcaggcagcgggagtgcagcaggcagcgggagcacagcaggcagagggcggggctcgagcagccatccgtggaccctggggcacggaggcatgtgggagagggctgctccatggcagtggctgaagggctgggttgtgccccgaggagggtggatgagggtaagaagtggggtccccaggggctttagcaagaggaggcccaggaactggttgccagctacagtgaagggaacacggccctgaggtcaggagcttggtcaagtcactgtctacatgggcctcggtgtcctcatctgtgaaaaaggaagggatggggaagctgactccaaggcccctcctagccctggtttcatgagtctgaggatcccagggacatgggcttggcagtctgacctgtgaggtcgtggggtccagggaggggcaccgagctggaagcgggaggcagaggggctggccggctgggtcagacacagctgaagcagaggctgtgacttggggcctcagaaccttcacccctgagctgccaccccaggatctgggttccctccttggggggccccagggaacaagtcacctgtcctttgcataggggagcccttcagctatgtgcagaaggttctgctctgccccttcctccctctaggtgctcagctcctccagcccactagtcagatgtgaggctgccccagaccctgggcagggtcatttctgtccactgacctttgggatgggagatgagctcttggcccctgagagtccaagggctggtgtggtgaaacccgcacagggtggaagtgggcatccctgtcccaggggagcccccagggactctggtcactgggcttgccgctggcatgctcagtcctccagcacttactgacaccagcatctactgacaccaacatttacaaacaccgacattgaccgacaccgacatttaccgacactgacatttaccaacactgtttaccaacactgacatctactgacactggcatctaccaacactgacatttaccgacactgacatttaccaacactatttaccaacactgacatctactgacattggcatctaccaacaccaacatttaccgacaccaacatttaccaacactgaaatttaccgacaccgacatttaccgacaccgtttaccaacaccgacgtttaccgacaccgacatttaccgacactgatatttaccaacactgacatctactgacgctggcatctactgacaccgatgccagcatctaccaacaccgacatttaccaacactgacatttactgacactgatatctactgacactggcatctactgacaccaacatttaccaacaccagcatctaccaacaccgacatttaccaacaccagcatttaccaacaccgatgtttaccaacgccgacgtttaccgacgccagcatctaccaacactgacatttaccgacaccgacatttaccgacactgacatttactgacactgacatctactgatactggcatctaccgacactgatatttaccaacgccagcatctactgacactgatgtttaccaacaccgacatttacgagcaccgacatttactgacaccaatatttactgacatcaacatttagccatgtgatgggggccggcttgggggcaggccttgctcttggcactggggatgctgcagagaccagacagactcatggggtcatggacttctgcttcttctccagcctcatgtactggacagactggggagagaaccctaaaatcgagtgtgccaacttggatgggcaggagcggcgtgtgctggtcaatgcctccctcgggtggcccaacggcctggccctggacctgcaggaggggaagctctactggggagacgccaagacagacaagatcgaggtgaggctcctgtggacatgtttgatccaggaggccaggcccagccaccccctgcagccagatgtacgtattggcgaggcaccgatgggtgcctgtgctctgctatttggccacatggaatgcttgagaaaatagttacaatactttctgacaaaaacgccttgagagggtagcgctatacaacgtcctgtggttacgtaagatgttatcattcggccaggtgcctgtagacacagctacttggagactgaggtgggaggatcgctggagtccaagagtttgaggccagcccgggcaaaggggacacaggaatcctctgcactgcttttgccacttactgtgagatttaaattatttcacaatacaaaattaagacaaaaagttaatcacatatccactgccctgcttaagacagaaaacatgggtgttgttgaagccagaggcagctgctggcctgagtttggtgattggttcctaagcagttgaaggcagttttgtttttccatagatgtctgttctccctttgctgggtgcagcctcgccctgctgctgtggtcgggtttcagtggcctcgtcccgtggacgcagcctcgccctgccgctgtggtcgggtttcagtggcctcgtcccgtggacgcagcctcgccctgctgctgtggtcgggtttcagtggcctcgtcccgtggacgcagcctcgccctgccgctgtggtcgggtttcagtggcctcgtcccgtggacgcagcctcgccctgccgctgtggtcgggtttcagtggcctcgtcccatgggcgtgctttggcagctttttgctcacctgtggagcctctcttgagcttttttgtttgttgtttgtttttgtttgattttgtttgattgtttgtttttgttgtcgttgttgttgcccaggctggagtgcagtggcgcgatctcagctcactgaaacctctgcctccttgggttcatgccattctcctgcctcagcctcccacatagctgggattacaagtgcccgccaccacgcctggctaaattttgtatttttagtagacagggggtttcaccatgttggtcaggctggtctggaactcctggtctcacatgatccacctgcctcggcctcccaaagtgttgggattacaggcgtgagccaccgcgcccagcctctgttgagcatattttgaggttctcttggtgccagtgatatgtacatgtgtccccatcgcaccatcgtcacccattgaggtgacattggtgcctctcctcggggtggatgcctccctctgtttccagcaacttctgaaggattttcctgagctgcatcagtccttgttgacgtcaccatcggggtcacctttgctctcctcagggctcccaggggaggcccgaatcaggcagcttgcagggcagggcaggatggagaacacgagtgtgtgtctgtgttgcaggatttcagaccctgcttctgagcgggaggagtctcagcaccttcagggtggggaacccagggatgggggaggctgagtggacgcccttcccacgaaaaccctaggagctgcaggtgtggccatttcctgctggagctccttgtaaatgttttgtttttggcaaggcccatgtttgcgggccgctgaggatgatttgccttcacgcatccccgctacccgtgggagcaggtcagggactcgcgtgtctgtggcacaccaggcctgtgacaggcgttgttccatgtactgtctcagcagtggttttcttgagacagggtctcgctcgctcacccaggcgagagtgcagtggcgcaatcacggctcgctgtagcctcaatctccctgggctcaggtgatcctcctgcctcaccctctgagtagctgggactacagacacataccaccacacccagctagtttttgtgtattttttgtggggggagatggggtttcgctgtggtgcccaagctgatctcaaactcctgaggcacaagcgatccacctgcctcggcctcccaaagtgctgggatgacaggcatcagccgtcacacgcagctcaatgattttattgtggtaaaataaacatagcacaaaattgatgattttaaccattttaaagtgaacagttcaggctgggcgtggtggcttatgcttgtaatcccagtactttgagaggctgaggtgggcagatcacctgaggtcaggagtttgagaccagcctggccaacatgatgaaatccagtctctactaaaaatacaaaaattagccgggcatggtggcaggtgcctgtaatcccagctactcgggaggctgaggcaggagaatcgcttgagcccgggaggtggaggttgcagtgatctgagatcatgccactgcactccaatctgtgtgacagagcaagactctgtcttgaaaaataaataaataaaaaaaattttaaaaagtgaacaattcagggcatttagtatgaggacaatgtggtgcaggtatctctgctactatctacttctagaacactttcttctgccctgaaggaaaccccatgcccaccggcactcacgcccattctcccctctctcccagcctctgtcaaccactaatctactttctgtctctgggggttcacttcttctggacgttttgtgtgactggaatcctgcaatatgtggtccctgcgtgtggcttctttccatagcattgtgttttccagattcacccacacattgtcgcacgttatcagaatctcattcctgactgggtgcagtgggttaggcctgtaatcctaacattctgggaggccaaggcgggacgatcacttgaggcaggagtttgagaccagcctggccagcctagcaagaccccagctaccaaaaaattttaaaagttaactgaacgtggtggtggtgggcacttgtggttcccagctacctgggaggctgaggtgggaggatcgcttaagcccaggaggtcaaggctgcagtgagctatgatcgcaccactgcactccagcctggacaacagagcaagaccctgtctgaaaaaaaaaacaaaaaaaaaagttcctttctttttgtggctggatgacatcccattgtatggccacagcacattttgtttgtctgtttatcgggtggtgggcagtggtttccaccttttgtctcctgtgaataatgctgctgtgaacatttgaattcaagtttttgtttgaacacctgttgtgaattatttggatatatgtgtaggggtaggattgctgagtcctatggtaatgttaggtttgacttactgaggaaccattaaactgttttcaacagtggctgcgccgttctgcatccccaccggcagtgtgtgagggttctgactttacctcctcacaaacgcttcttttccatttaaaaaaatattcagccaggtgctctggctcacgcctgtaatcccagcactttgggaggccgtggcgggcggatcacctgaggtcaggagttcgagacgagcctggccaacatggtgtaaccccatctctaccaaaaatataaaaattagccgggtgtggcagcgggcgcctgtaatcccagctacttgggaggctgaggcaggagaatcacttgaacccgggaggcagaggttgcagtgagccaagatcgcgccactacactccagcctgggtgacaagagtgaaactccatctaaaataaaacaaaaataaaaataaataaaaatttattaaaacattcatcacagccagcctagtgggtgtcccatgtggctttgcctcgcatttccctgataactaggatgctgagcgtcttgtcccaggcttgccacacctcagcactttgagatacgtcgcacagtccccatttgcgaacgagaaatgaggtttagggaacagcagctgtgtcatgtcacacagcgagcagggggtctctgagccgtctgaccccacagccgaccaagctccaatccttaccgcctcctagtgttgtggatgtagcccagggtgctcccacatttttcagatgagaacaccgaagctcaaaacaggagcgttttgtccacattggatacacgatgtctgtggtttggtcctgaagtcactttatatctcagtggtccagactggagtaggacagggggttctggggaatggggaaggtgtctcaggtgaaaggaaggaattccagattctccatactgtccttgggaagttagaagactcagagggtctggcaaagtcagacaaagcaagagaaatgcagtcaggaggaagcggagctgtccaggaacaggggggtcgcaggagctcacccccaggaactacacttgctggggccttcgtgtcacaatgacgtgagcactgcgtgttgattacccactttttttttttttttgaggtggagtctcgctctcttgcccagtctggagtgcagtggcacgatctcggctcactgcaagctctgcctcccgggttcatgccattctcctgcctcagcctcccgcgtagctgggactacaggcgcctgccaccgcgcccggctaatttttgtatttttagtagagatgggatttcactacattagccaggatggtctcgatctcctgacctcatgatccgcccgtctcggcctcccaaagtgctgggattacaggcgtgagccaccgcgcccggcccgatttcccactttaagaatctgtctgtacatcctcaaagccctatacacagtgctgggttgctatagggaatatgaggcttacaggccatggtgctggacacacagaagggacggaggtcaggaggtagaagggcggagagagggaacaggcggaggtcacatccttggctttcaaaatgggccagggagagacaccctctgagcatggtaggacaggaaagcaagattggaacacattgagagcaaccgaggtggctgggcgtggtggcttacgcctgtaatcccaacactttggaaagctgaggtgggtggattgcttgaggccaggagttcaagaccagcctggccaacatggtgagaccccgtctctactaaatatacaaaaattagccaggcgtgatggtgcatacctgtaatcccagctgcttgggaggctgaggcaggagaattgcttaaacctgggaggcggaggttgcagtgagccgagatcccgccactgcactccagcctgggccacagagtgagactccatctcaaaaaaaaaaaaaaaaaaagataaaaagaccaaccgaggaattgaagtgggggggcgtcacagtagcagaagggggatcgtggagcaggccaccctgtggtcatgcactggaagctcattacctgacgatttggagctcatcactgggggcctaaggagaatagatactgaaggatgaggagtgatggcgcggggcacgggtgtctttggtggccagaacttggggactgctggggtgcctcactgcaggccttctcagcgccctttatatgcttacacaggctgtttctaagagggggatacattgcataagcgttttcagactacctcatcatgggtccctttctttaccctctgtggccctggtggcgcactctctgggaaggtgcaggtggatgcccagacccgccctgccatccacctgcacgtccagagctgacttagcctcgagattgctgctggcacctcctgccccgggacacctcggatgtgcccgtggagatgctggctctgtgttttctgctggagtttggtgcgtcttttcctcctgcaagtggccaccgctcttgggtatgtcctcaggcttctgcgagtcatggctgcttctcaggtccttgcccagcgccaggagcaaaccctcctggcactttgttcaggggtggatgcgccagtgttcctgctgtggacccccatctcacatgagggtcttgggcctgcaggctcgttcaggaaacacccgctgagtacgcagtgtgtgccagctgtgtcccaggcaatggcggggacagtggctgctgctggggttgtggtggcttctggggactctggggacagctgaggtgcaaggagccacggctccttgaggatgcagttggactccaggtggaagggatggttgggggaggtataaatggggtcagggaggagacacatttggaacaatgggaacatttttaagatgctatgtcgggaggcaacaaggtggccaacccaggtgctgaggagcccacaccagccctggacgtgttttgccgctcacctttgctggggagtggtgggagagaggattccgttccacgtggtggtgtgcgcagctgggctgtgtggagctgggcgctaggaggaaggtgctttctgcggggctagccgggctctgcctttgaacacaatcaggctccaggttttcagcatccagtgcatgagaggacttcacgggcagctgtggctgatcccttgatgaattgggagaagaacaaaggtctatgaaatgaggtttcatgtagatggcattagagacgcccacaacagatttacagagtggagcggagacggcggatgggtctgggaggcccctcctgctggccttgactgtgacagctgtcctgggaatcagcttccaggccgccccagcagcctgactgacacacacaggggttttagccccatcctgcgaccagctgttgccatcatcagtgacagctgggagtggcggtggttccagccctgggcaccctccccacctgctggggcccacccagggcagtcctgacacctacaggttgcttggagccgcatccgagtcctgccccaccacgtgtgaagcccgagtggtcgtgggctgaggtcccctgattgcatccccacttcccttctgcttcacatagctgcctcttctcaccgtttttccagcctcctgggctaggaattccagtgttgtgctggctttgccccaggacacctccttagccctcttcctgagtctagagccccgggggttggaagttctggcccctgggacacctgcagccacactcagcttctcctgtgagcctccagcatgtcccctcaggaccaagccctcacgttcttgcctccccgcccacctgggctcagccaggggaaggcctggctgggagcgtctcccctctgccctgcccttctcccctctaccctgcccttctctcctctgccccgccatggcttttatatcctgtgccacaagacatggctgtgtgtgaaagtggcagggtctggcatctctgtgggtctctgaggcccacgctccagtgccactcttcccacccgctggccgtgccctcatgctggagggacagcccagccctctcccgaaccccagccccatgtgcccagctgcccccggccctctcccctggaagccggggtcactccagccgtatgccatggtggggacatcctgcttccttggccttccagggaaggtcctctttccaaatggcgacacctggtccctgcctggaggctggaagctgtggcccttgtatgcccctccagggtctgtgcgctcggttggcccgagttcccatcaccgtcatcatcaccatcatcattgtcatttcgcttgtctgtgagccggcctggtctcccagagcagagaccctctgaggtccagcctgagttggggtctccgtgctgacccctgacggggactcaggacgtaccaggtctgggtcaggagtgacccccaaacctcgtgccctttgacaggcacccctgacttttgctaagtgggtggaggtgacatcacttacagcgggagtgatgggacagggtctgttggctgcactgtgctcccagggatctggggagaggctatatccctgggctttggcactgcagagctgtgtgtgtttgtgtgtgtgtgtgtgtgtgtgtgtgtgtgtgtgtgtgtgtgtgtgtgtgtttgcgtgcgcgcacatgtgtataagatctttttttattacatgaagcaagataactgttgctgtttccttttgggttttgtgttcaacagagtggggtacttcttccctcagacaacagaactctcccctttaaacacgtgctgtcagagggtgggtcttgggctcatgtctgtttgcacagccgagtcagaggaaacacagggttcttcataaaaacactgcacagcaggcgactgtccagagtcagcctgcaggacggcagcagccctgcccctcagagcacagctagggtgggctgctttgggatctcccgtcattccctcccagctggcagccggcggccggcccattccttggtgtgctggtcaggggggcgtgcgcctgctctgctcaccctgggaatgggacagaagctggcagctcggagaggacagggctggacccttgggtggcctctggctggaccatctcattgtcctcagacacagcctctcgggtctagtttcatttcctgaaaaacaagtgcacagaactagagcaggagtcgagagctacggcccccgggccagatccagccctgccacctgttttcacaccatgctcaagctgagtgggttttacattttttaattacttgaaaaaaaaaaagccaaaggaggtttcatgacccatgaaaattatatggaattcaaaaaaaaaaaattatatggaattcaaatttcagtgtccataaataatttcttgagacagggtctcgctctgtcacccaggctggagtgcagtgctatggcatggctcgctgtacccttgacctcccaggctcaagcgatcctcctgtctcagcctcctgagtagctgggactacgggtgtgtgccaccaagcccggctaatttttttttaattttagtaaagacagggtctttctatgttgcccaggcttttctggaactccatcttggcctcccaaagtgctgggattacaggctcgagccacggagcccagcctgtttttgttttttcactgataaagttttgccgggtgtggtagtgtgtgcctctagcgatttgggaggctgaggtgggaggatcgcttaagcccaggagtttgaggctgggctcaagtgatcaggaggtgaactatgatcatgtcattgcattccagcctgggtgacagagcaagaacctatctcttaaaaatatatatttaaaaagtattgggtgtggtggctcacgcctgtggtcccagctacttaggcatctgaggtgggaggatggcttgagcccaggagtttgaggttgcagcgagccaagatcgtgtcactacactctagcctgggtgacagagcccagaccctgcctctttaaaaaaaaaaaccaaaaaacatgtattggaacacagccatgcctgttcagtcacgtgctctccatgctgctttctgctccagagacccttatggcctgaaagctgaaaatattttctatcctttacaaaaaagtttgctgacctctgtcctggaaaattcatctcccaagttctcttccggcactggcgttcctgggtgtcctaaatttggcccctgttatttctgaactctgttttggctctgttccctcccaggagccaggacaggcacgttctctgcatcttgtcccctgacgcccagaggcttggctcggctcaggcattcttggaaatatctggctccaggaaaggcagaggcctcctgagtcagcccagagggaacctgccccaggtctgggggaggcctgacccagcagagtggcttttgccgatgggttgggccggtcaagatgtgctgaaagttgtcctcagaaggccactttgggattccttcctccagtattagagcaactgagagctgctcattgcaagcctgatgttttcccagttggccgggtccaccgggtgccctgggattctgggatctgggtggaaagtagggggcttgggggagtgtcctgggttctggaatccaggtggcaagtggtgaggttcagggagtggcttctgagccaccataggggtctctgtgggaggctctgcccatccaggagattccgcaggccctgccggcccagagccagcgtcttgcgcttgccgaggctacagccagccccagccgggtggaacagcccgtcgcctcctctcactttgttttggggccacctgggagtgtggagcaagggtagagagggaggaagtggctgccggccgctgcccagcacccttgtttgccttgggccctctgtgggctcctttttattgctcttcaatgaagccagggaaatggacttccttgcctcacttcagttcaacatgtctggaagtttggtattaaaattaagaaagtgtggaaatagagcaagaagagaaaaatctctccaagagataatagtgacctctgagctgggcgcggtggctcacgcctgtaaatcccagtactttgggaggctgaggcgggcagatcacctgaggtcgggagtttgtgaccggcctgaccaagatggagaaaccccgtctctactaaaaataaataaataaataaataaataaatacaaaattagccaggcatggtggcgcctgcctataatcccagctaaggcaggagaatcgcttgaacctgggaggcaaaggttgcagtgagccaagatcacgccattgcactctagtctgggcaacaagagtgaaactccgtctcaaaaaaaataaataaataaaaaataaaaatagtgacctctggccaggtgtggcagctcatacccgtaatcccagcactttggaaggaaggccgagatgggcagattgctttagcacaggagtttgagaccagcctggccaacatggtggaaccccatctctacaaaaatagaataaaatttaagaggtaatagtgaccttttggtagatcgaaacctggattgctttctttttctaaatgctgattcttttctttgtggtgtttgtgttctgtgccgatgtccctcccccagccctgttattgtgagtggaagaaggggaaagggttcgcccgctactgtgagcccctcctctcacgctgggtgtccttggagaagcctgcacttcttcattgtacgccagggctgggtccctccctggagtggttctgtgctgctgggatggggccaacccctcagatgttttctgagtgtcacacacaggtgtgtgcattcatggcctttgcgtgtcttcctgttgtggaggcaaaaatgtgaagaaccctagatgattttgggaccagggctccatcacctgctgttcattgcacaccggagcatccaggcatgggtggagagctcagacttccaggcacggtcgcaggggctggtctaaccatgttcccgcccgcctgctcgtcagaaccgcctgttgggagctgttatcatgataccatacctgggccctgggctatccgattctgacttaattgctccaggttggggccaggccgttgtttgctgttttgttgtttcttctgtgacgttagccactgggctaatctgagcccctcagttacaggtggagaaactgagacccatgggggtgcaaggacttgccgaggacccagagccccttgggggcagagctgaggcggggcctggctttgggtcccagagcttccagtccccttcccgctctcctaacagcttttttttttgagacaagatctcaccctgtcacccaggctggagtgcaatggcatgatctcggctcactgcaatcttcgctagctgcgttccagcgattctcctgcctcagcctcccgagcagctgggattacaggtgtgtgccgccatgcccagctcgtttttttttgtacttttagtagagatagggtttcaccatgttggccaggctgatctcgaactcctgacctcaaatgatccgcctgcctcggcctcccaaagtgctaggattacaggctgggatcacactgtgcctggccctagcagctttgtcctgtgccatccaacaacagatgaccgaagtctttgtttcttaacatgcattccatctgccttacagttttgccacctgcaaaacagaggacttgtcgcttttctggtaagctggaaatgtaatctggtagcaggaggcctgtggaagcttgcctttaatggccttgtgtctctttcatcctgtcctgagagccggagaacttggatgttgcacctaactcaaccttcctgttaacatacagttctgcaggctcatggatcatcagaaccacgtcctatctcacgcggctgtatgcttccgttggttcaggtgtttttaccttgacagtattttctcctcggtggcttttgcggtggttgcttttaatcagcattgactcttcaagaaaaatatttagctgctacatctcagaggagacagggtggaaagcatctgagacctgcaggctcagacttagaaccagaagtgccctcagagttcatccggccctgacccagcgggaaatgagttcacagagaagcgggagaactttgccccaggccctgccgttgctcataactgccccaggtccttacatttgctccaggtcctgccccaggccctgcagttgctcataactgccccaggtccttatatttgctccaggtcctgccccaggtcctgcagttgctctgtgtggtgggtgtgatctggagccctccgcccattgctgcacctggggcaggcattgctaattgatcccaggactccttcctgcggagcacgccctggttctccaggcagccgctgcctgtcagcctgcagtggttcgggagaggacacctgcttgcctggtctgttccaaatcttgcttctcatcccagcacaggtagggggtgctatgggaaagggatcctcagttggccctgtcactgctctatcagctggggacgtggcatcctagtgaaaacatcatggccgggcgcggtggctcacgcctggaatcccagcactttgggaggctgaggagggtggatcacttgaggtcagaagttcgagaccagcctggtcaacatggtgaaacccatctctactaaaaatacaaaaattcgccaggtgtggtggcgggtacctgtaatccgagctactcgggaggctgaggcaggagaatcgcttgaacctgggaggtggagcttgcagtgagccgagatcttgccactgcactccagcctgggcaacagagtgagacgctgtctcaaaatctcaaacaaacaaacaaacaaaaaacaaacaaacaaagcgtcatttatccagcacccctggggaaccatgctacctggtgttttatggtacctggcaaggtgcaggtgaagttgctgctcttgggcattgaacccgtcttgtttggggcagctcaggccccaggcagggtccgggttggctctcgttggtgtggccctggcccatccagacctatatttctgccgtcctgcaggtgatcaatgttgatgggacgaagaggcggaccctcctggaggacaagctcccgcacattttcgggttcacgctgctgggggacttcatctactggactgactggcagcgccgcagcatcgagcgggtgcacaaggtcaaggccagccgggacgtcatcattgaccagctgcccgacctgatggggctcaaagctgtgaatgtggccaaggtcgtcggtgagtccggggggtcccaagccatggctcagccatgcagacttgcatgaggaggaagtgacgggtccatgcctgggcataagtgttgagctcaggtgccccgacctggggaagggcaggacaggaaaggtgacagtatctggccaaggacagatgggaagggaccaagggagctgattagggagtggttatggactaggaatgtcggtaacaatggttagaaagtgactaacatttgttgagcacctgctgtgtgcccggccctggccgggagccttcgtgcccacagtgaccccgtctgcaaatgtagttccttgccctactcgcactggggagcaggacgcagagccgtgcatctcacaggtgccaagctcaggactccctcctgggtctgcctgggctgggctgtgcttgttgcccctgtggcccacgcatgtgcaccttccacctgaaagccaggatcttcaggacgctccccgaggaggtcgttgtctggcacaatgatttgtctcttcctgaaaaggtgacagagttacactggagagagcagcatccaggtgcggcagggacaggcctggggctcgcgggcagggactctgtgtcctgccggggtcccacactgcacctgcttgtcagaggcactcagtcaatctttgctgatgaaggatgagaggacagaggacgtgatgcttgctgctgcattgcctgcagtcctgggtgagatgcccgggttgactctgctgcccgtcgggtggatgtgatgtcagatccccggctttaaaatacgagggagctgggaattgagggagcaggttggggcagaaagcacagccccgtggaagcctggagctgaggcagtgtgggcgacccctggagcagtgagtgcttccttcatggccttcatcgcaccctgcagtcctcatgtaggggatgccatccatgaatttagttttcccagcctcctttaaaaacgcgttcatgctggggccggggcagtgcagtggctcacatctgaaatcccaccactttgggaggccgaggcgggtggatcatgaggtcaggagatcgagaccatcctggctaacaaggtgaaaccccgtctctactaaaaatacaaaaaattagccgggtgcggtggcgggcgcctgtagtcccagctactcgggaggctgaggcaggagaatggcgtgaacccgggaagcggagcttgcagtgagccgagattgcgccactgcagtccgcagtccggcctgggcgacagagcgagactccgtctcaaaaaaaaaaaaaaaagtacaaaaaaaaaaaaattagtctgggtgtggtatcacgcgcctataatctcactactcgagaggctgaggcggagaattgcttgaacccaggaggtagaggttgtagtgagcccgtatcgtaccactgccctccacctgggcaatagagcgagactctgtctcaaaaagaaaaaaaaaaaaagaacatttatgccaggtgtggtggctcatgcctgaaatcccagaactttggaagactgaggcaggaggatcacttgagcccagaaatttgagagtgtcttccctgggcaacatagagagacctcatctctaccagaaaaaaaaaaattagcccggcatggtggcatatccctgtggtcccagctacttagggggctgacgtggcaggatcacctgagtctggaggcagaggttgaagtgagctgagatcatgccactgcactccagcctgggtgacagacagagaccctgtctcaaaaaaaaaaaaaaaaaaaagcatttactatccaccatggaaggtgagactgacctgtgagtgattgttcaaagaacaaaaaataaaccccagagataagacaaaagggtgcctccatgggggtgtgatttaaagctgagaaattgggcttcttccccctcccctctcaccccgtggtttgctaaaggagatgggaaaaaggattctttttttggctgaaatatttaacactaaattaaagccaattttaacagcactttggttgatgagtgaaattaacagactggccaaaaataaacgaacggtctgtactatgtgaaaaagaggcagctttggccatgctgggccaatgtgagttttcagggttgctgggaatgtctgtgaatcggaggaagggcctagctgggactctcaggagccaaggccctgaggggcaacttgcctggtccctgccctgaggcgttcactgctttcttcctgggccagatcacaggcccggaggctggaccactgggctggcactcttgccgagctgctccctgacttcctgaccatgctcctttcagcagccttgctgcactttagtttccttgaatgaaaaatggggatgagaatagctcctacctccaaggtgaatggagtgagttcggacaggtgactccctgggaccagtgcctggcgcctgacaaggtccagtcagagcccgcactgctgttactgatacccttggctgtaccaggggagaacttggttgccattgccaggtgttctcccaccacccccactactgtccctgtttgatgtgtggcgggaataaagctgtgcacattggagcttttggcacatcctggctttcaggtgaaaggtgcgtgtgtgtttgagggtttagcctggccaacccagccatgaggtcggacctgacctgggggtgagtcctgagctcggcacccctgagctgtgtggctcacggcagcattcattgtgtggcttggccgcacccctttccctgctgggctgttgatgtttagactggagcctctgtgttcgcttccaggaaccaacccgtgtgcggacaggaacggggggtgcagccacctgtgcttcttcacaccccacgcaacccggtgtggctgccccatcggcctggagctgctgagtgacatgaagacctgcatcgtgcctgaggccttcttggtcttcaccagcagagccgccatccacaggatctccctcgagaccaataacaacgacgtggccatcccgctcacgggcgtcaaggaggcctcagccctggactttgatgtgtccaacaaccacatctactggacagacgtcagcctgaaggtagcgtgggccagaacgtgcacacaggcagcctttatgggaaaaccttgcctctgttcctgcctcaaaggcttcagacacttttcttaaagcactatcgtatttattgtaacgcagttcaagctaatcaaatatgagcaagcctatttaaaaaaaaaaaagatgattataatgagcaagtccggtagacacacataagggcttttgtgaaatgcttgtgtgaatgtgaaatatttgttgtccgttgagcttgacttcagacaccccacccactcccttgtcggtgcccgtttgctcagcagactctttcttcatttatagtgcaaatgtaaacatccaggacaaatacaggaagactttttttttttttttttgagacagagtcttactctgttgcccaggctggagtaccgtagcgtgagctcagctcactgcaacctccgcctcccaggttcaagcgattcttctgcctcagcctcctgagtagctgggactacagacatgcaccaccacacccagctaattttttttatatttttagtagagacagggtttcatcatgttggccaggctggtcttgaactcctgacctcaggtgatctgcccgcctcggcctcccaaagtgctgagataacaggtgtgagccaccgttcccggcataggaaaactttttgccttctaaagaagagtttagcaaactagtctgtgggctggccttctgattctgtaaagaaagtttgattggtggctgggtgcggtggctcacacctgtaatcccatcactttgggaggccgacgtgggcatatcacctgatgtcgggacttcgagaccagcctcaccaacgtggagaaaccccgtctctactaaaaatacaaaaaaaaaattaaccgggcatggcggcgcctgcctgtaatcgcagctactcaggaggctgaagcaggagaattgcttgaacctgggaggcggaggttgtggtgagctgagatggcaccattgcactccagcctgggcaacaaaagtgaaactccgtctcagaaaaaaaaaagtttgattggtgtaaccaaagcgcatttgtttatggattgtctgtggcagcttttgttctgccgagatgagttgtgacagatctgtatgggctctaaagcctaaaacatgtgccatccgcccctttacagaaaaagtgtgctgacctctgttctaaagtattggacaactacaatgtttgctcatttattattctatgatttgttttctgctttttgttgttgttgttgttgttgagatagggtttccctctgtcactcaggctggagtgcagtggtgtaatctcagctcactgcagcctcgacctcctgggctctagtgatcctctcatctcagcctccctagtagctgggactacaggcacacaccaccactcctggctgattttttttttttttttttttttttgtggagacagggtttccgcatgttgcccaggctggtttcaaactcctaggctcaaacacccacctcagcctcccaaagtgctgggattacaggcgtgagccaccatgcccagcctattctactgtttgtattacatagctttaaaagattttttatgactttaagtcacaagggttctttgtagaaaaaaatatatatataggaaagtataaaaagaaagtaaaaattgtccataacctctccagccagagacgaccgttgctgacacctcagcatattgcctttaagtcttttttctctaagatagcatttctcttcatcacagtcatatgctacgcagaattctgtatcctgattttttcacttgacattacaacaggtatttgatggcgctgtgacaaactctttggcacaatcttttaaatgtatgaaatactccactgcacagatgtttgcttttaggcttaactgttcttttattttgcgtgtgctggttacagccgggcacagtggctcatgcctgtaatcacaacactttgagagggtgaggcaggaggatcacttgagcccagaagtttgagaccggcctgggcaacatagtgagaccccatctctacaaaaaacttttttaataagtcgggcgtagtggtgcatagctgtagtcccagccaccaaggaggctgagttgggaggattgcttgagccccaggaggttgatgctgcagtgacctgagattactccactgtactccaacctgagcgacagagcaagacttgtctggggaaaaaaaaaaaaaaaatatatatatatatatatatatatatacatatatacatacacgcacacacacataatataaaaatatatatttataaatatataatatataatataaaaatatatatttataaataaaatttataaattatatttataagtaaatatataatatataatataaaaatatatattatataatatataataaaatatataatataaaaatatatatttataaataatatataatacatacttataagtatatatttaaaatatatgtaatgtatattttttaatgtatgatatataatatacatttataaatacacatttatattattttatataaaatatatataaaatctccaagttgctttttccaaaaaggtgtcttgctgcatttcaaacattcatttaaaaacttgaatgctggtgatctggtccagaatgtgttcagtagctgctgccagtggccaagcatctcgggagatgtctacaaaacacgctggttctggcctggcgtggtggctcacgcctgtaatctcagcactttgggaggctgaggcaggtggatcaactgaggtctggatttcgagaccagccttgccagcttggtgaaaccccatctctactaagaatacaaaaaaattagccaggcgtggtggcatgtgcctgtaatcccacctacttgggaggctaaggctggagaatcgcttgaacccagggggcagaggttgcagtgagccgagatcgcaccattgcactccaggctgggcaagaagagcgaaactccgtctcaaaaaaaaaaaaaaagatgctggttcctaaaatgtggcccttttcctcctcacctgctgccagaccatcagccgcgccttcatgaacgggagctcggtggagcacgtggtggagtttggccttgactaccccgagggcatggccgttgactggatgggcaagaacctctactgggccgacactgggaccaacagaatcgaagtggcgcggctggacgggcagttccggcaagtcctcgtgtggagggacttggacaacccgaggtcgctggccctggatcccaccaaggggtaagtgtttgcctgtcccgtgcgtccttgtgttcacctcgtatgagacagtgcgggggtgccaactgggcaaggtggcaggctgtccgtgtggccctcagtgattagagctgtactgatgtcattagccttgatggtggccaggactggtagggccctcagaggtcatggagttccttcgtggagcgggtgctgaggctgtatcaggcacagtgctggctgctttcacctgggccgtctcaccgaagtgtccatggagcctgcgtagggtgggtatctgtgtcgattttacagatgcagaaacaggctcagagaaaccgagtgacttccctaaggtcacatacccagttagagcagagctgggccaggaagtgctgtctcaggctcctgaccaggtctccttgctttgcactcttgccaaaaccatgatccagaactgactttgaggtccccggacctcaggctcctccgaaatggcctcttggaggctgctgagccacagcttaggacccacctcgagaggcaaatgtgctttgagctgccaggcgtcctgggggccctgccttgggcacggggttcagacaggccccagatgtgtggggcgtctttctggacttgagttttcttttctgtgtggtggacacagtgctcaccccttaaagcacctgtgatgtgtgcagcagcccaatccctgcctgtcgcctgttctgctagggaaggaaggaagacttcaggatggcaggacaacagaaagaggtccaggttttagagcaagggcaggtcaaacttagaaaattctggaatgaggatgtgcatttcctcttctggatctgctaaaagaagagggaaggaggggctgctgggggaggagcccagagccgagtttacatccggatcccgcaaggcctcccctgccctgaggtcttgttttgtgatgtgcttgtgtccatcctggtttctgccgtgtccccaacatccggccaagcttaggtggatgttccagcacacactcaccctgtctgtgcacctgtttttgtgtccgtaagtgggtatttactcaccttacgagtgagccactgtgggaattcagggaggtggcgcagtgaccacccctggagggatatgtgtgtggcaggggtcgagggtctcgcccttccctgcttcctgcgcgtggctttctccaggacggggagggctgagctgaagaggtggggacagttgcgtccccccgccacccactgtcctgcggtgagagcagactcactgagcctgcccttctcccttgtgccttccagctacatctactggaccgagtggggcggcaagccgaggatcgtgcgggccttcatggacgggaccaactgcatgacgctggtggacaaggtgggccgggccaacgacctcaccattgactacgctgaccagcgcctctactggaccgacctggacaccaacatgatcgagtcgtccaacatgctgggtgagggccgggctggggccttctggtcatggagggcggggcagccgggcgttggccacctcccagcctcgccgcacgtaccctgtggcctgcaagttccccaacctggcaggagctgtggccacacccacgactgcccagcagcctcaccctctgctgtgggagttgtccccgtccacccctgggtgcctttgctgcagttatgtcgggagaggctctggtgacagctgtttcctgtgcacctgctgggcactaggtcccagctaatccctgtgccaggactctaatttcaccctaacacacatggtggttttcattgctggggaagctgaggcctgagcacatgacttgccttaggtcacatagctggtgagttcaggatcccccagagataccagggccagcactcgatccccacccagccctgaaccccaccatgtgctgggattgtgctgggagtgtccacacgcctgggaccccagggctggtgctctcatctcctttttccagatcatgagaatgaggctcagggaagtttgaaaaaaacctatcccaagtcacacagcaacaggagcaggatttgaacccagaaaaggggaccgcacactctgttctgctagagtagttagctgtcctgggtgatatggcaggtgacaggggcaactgtgcttaacaaaggaacccccatcccccctgccaagttgggagactagaaggtcaggggcagaagctctgaagggccaggtgcagtggctgacacctctaatcccagcactttgtgaggccaaggcgggcagatgatttgagcccaggagttcaagatcagcctgggtaatgtagtgagacgccatctctacaaaaaaattttttaaaaattagctgggcatggtggttcatgcctgtagtccaagctacttgggaggctcaggtgggaggattgcttgagcccaggaggttgaggttgtggtgagctgtgatcatgccactgcactccagcctgggcaatagagtgagaccgtctccaaaaaaaaaaaaagaagaagaaaaagaagctctgaggctccaagtccccaggcaccccttggcttgagggcagacaagggaggagagggtcacctgggcagccctgacttttgtcccctggcaaagggaccttcagtgaccttggccctaggagagcctctgagcacgtcagccatgtcgaaccgctcaggaagggcagcaagaatttggcttctgacctctgcctctcctactcgccatctgcactgggtgtggttgtgcccattttacagatgaggaggctggggcatcgaccagctgaatgccttgtcccaggtactgcgtaggcagagctggcagttgaaccccgtgtcctggttgtcgctgggggtgggctgcaccctgacttgtgaggccagtagcaaggtttgcacgtgacttcgtgaccgtcacccagctctgcagcacatcccgtgacccagctcatccaggccgcatgcaaacctgttgccaggcgagaaaccagtcaccgcacagctgtggttgcctgaaatgattaagctcattaatcaccccggagtgaggacagactcagatgaaaaccagcaaaagccctggaaactcatgtgaccctgccaatgagggcggccatgtgcattgcagcctggccgtcactcctcggtacgtgttttggacttaaacgctccggatgtttactgagtgcttgattaataacatggaaggcctggtctcattgctgtgggagtgaaggatgcacagccaggcctgacatgatgagaacaagaacctggagtctcgctgcctgggtggtaatcctggccctgccacttagcaactgtgtgactgtagccaggtcacttaattttgctagatcctgcctgcgcttcagtggatcttgctggttttccaaggtggccaaacactttaaggcattcatgtggtcgctaggctgcagggttgaaccctggctcaccccgcagggcgccgtgtgctctgtggcctggctgtgcctttgctgacaccgtgcccgtgtgtgttcatgcaggtcaggagcgggtcgtgattgccgacgatctcccgcacccgttcggtctgacgcagtacagcgattatatctactggacagactggaatctgcacagcattgagcgggccgacaagactagcggccggaaccgcaccctcatccagggccacctggacttcgtgatggacatcctggtgttccactcctcccgccaggatggcctcaatgactgtatgcacaacaacgggcagtgtgggcagctgtgccttgccatccccggcggccaccgctgcggctgcgcctcacactacaccctggaccccagcagccgcaactgcagccgtaagtgcctcatggtcccccgcacctcactccctcgttagatcaggctggttctgggagctgacgctgaaaggagcttctcatctggggttcctgggtgtacatagatggttgggtaggttgtgcactgcacaagctgcatgatgctacctgggggtccaggtccaggctggatggacttgttgcttcatcaggacatagataaatggccaaaactcctcagctggaaggtcctgggcaggatctttgggtgtgaaaaccagtcacaggggaagggtgcttgctcatactgccagcacagtgctgagtgctttccatagcgctcgtttactcctcaagcctggagggtggggagtagcatggtcccatttcacgtacaaggaacccgatgcacagagaggtgtggcaacccatccaaggccatacaactggggtgggttgagccggggttgactgtggcaggctggctcaagagtccctgctcctgaacccttgccaggcagcctggcatcagctcggggaatttttgccctgacccttggaagcaagtgggcctctttgttctcatgtcagtgatgagaagagtgactttcctatggcccctctggagtacaggtgtttcctgttggcgggctcttcccccatgacatcagcagcgagctggttatgattccctacgcagaacttgatagtttataaagctctttgtcatccaggccccgttggagtctcacgcagacctggtcgcaggcggggctggtcttgcctgtcccagctgcatggatggggaacttgaggcttgcaaaggttaaggggctgttcgaggcccaggctggcaggagatgggcctgggccagagtctgggacttcccatgcctgggctgtctttggtcctgttgctcaccatccctccctggggccatgaccttagagagccaaatggaggtgcaggtaacccacggcaaggaggggttgccatgactcagagtccccgtcctgtggccggcagtacctggtgcaacgacttggatttcagaccagccactgtagcccgctgacggtgcgctcgaagtgccacagcttctgaagccaggcaggactcaggccaggagactctgttagctgttgagagggagaggccaacggatgttctggttctgctagagagctggttcttcggatcctggtaccagtgcactgagaggaggcccagcttgattctggggctgccttgtggtggcatgtgctgctcactgacaccctcgaggagtgtcttctctcgggcttgttgactgtgcccggttttccgcagttcactggtgcacacataggcacatagcaaaccgcacacacagtcgtgggtatgagtttcactacattccaccaccagtgttcactaccattacctgccttccgtcttaagtgttcatcatttaaaaataaatttattgggctggacgcggtggctcatgactgttatcccagcactttgggaggctgaggcgggcagatcacctgaggtcaggagttcaagaccagcctggccaatatggtgaaactccatctctactaaaaatacaaaattagctgggcatggtggggcatgcctataatcccagctactcaggaggctgaggcaggagaatggcgtgaacccgagaggcagagcttacagtgagcccagatagcaccactgcagtccagcgtgggcaacagtgcgagactccatctcaaaaaaaaaataaataaataaaagaaaaataaatttatgatctatttcaaaaataacacatgtactttgaaacagcagagacacatatgacacggagaatgaaattccccatagcgcacccccaagagacagccctggtccccccgtctttcccgtggacctccagcggggcagatgctgagccgcctgttgtcgagtggcgtgctatcccgtcctccagctcctctgtggcttacagacacccacctgcagccctgtctttgcctcctctagcgcccaccaccttcttgctgttcagccagaaatctgccatcagtcggatgatcccggacgaccagcacagcccggatctcatcctgcccctgcatggactgaggaacgtcaaagccatcgactatgacccactggacaagttcatctactgggtggatgggcgccagaacatcaagcgagccaaggacgacgggacccaggcaggtgccctgtgggaagggtgcggggtgtgcttcccaaggcgctcctcttgctggtttccaggctgctgcccctgtccttagcagagggaggaaacagaggatggctctgggtgaatgatgacttgggcttcgattatgtagtcacagggtatgaccctgagatgcgtggaaccccgagactgtgattatatgtagaaactgggtttccccgttgtttaagtagtcatggtggggtcagaccccacaggacttttgtcttttcaagaaagaaaatggtcgtgtgtcatgcaggggtagttggtactggttaatccaggtttatcctttattttgtgggaactgtacagtcatttctgctacaatgctgtatatgctcttctgaaagacacctatgcaaaatcgcacagtaaaaatgacacaactcatagggaaagcggggccagggcacagccctcaaaatctccatcaatgacatgtaagaaaagagaggaacctgggaaatagcaaagtgccttttgcacattaaatggttagctatatcccacaatactgtgcattcgtaaacgttaatgctgcaataaatacggcacttcaccttgggaagatctggagttggcttatgagtgtggaagggtgtagcgcatgagtttttgtgaaacactggaaggaggattgtgggaaatcaaatggaaagttctcaccccaggcgtggagaagagtgggtcatggccccagcagtgagcccagggaggtcagagacggaggtgtgtgtgtgggtgtgaccctgcgcagttccctgccggctgtagttttttgcattcgcttaatgtttctcgtggaggaaattgtgcatgagcaaatgtgaaaccgtgctgtgctcaaattgtcctaatacatcattgcattggaacagattggcttttttttttttttttttttttttttttttttgagatggagtctcactctgtcaccagcctggagtgcagtggcatgatcttggctcactgcaacctttgcctcctatgttcaagtgattttcctgcctcagcctcctgagtaactgggattacaggcatgagccaccgcggccggccagatttgcatttttgaaacaactgctaggctgggcgcggtggctcacacctgtaatcccagcactgtgggaggccgaggcaggtggatcacctgaggtcaggggttcgagaccagcctggccaacatggtgaaaccccgtctctactgaatatacaaaaatcagctgggtgtggtggcgggtgcctgtaatcccagctactcaggaggctgaggcaggagaattgcttgaacccaggaggcagaggttgcggtgagccgagatcacaccattgcactccagcctgggcaacaagagcaaaactccatctcaaaaaataaaaaatagaaaaacaagtgctgtagcggaagtgagcactttgcggagtcaggcttgtgtggcctgttccacaaatgatgtgctcacggtggcctcaggcccacctggagtctgcagcatggggcacaacaggttcattagtgtagaattccaggacaggcctggctcctaagcagccttcttttacaaaaactgcagagcccgcctgtatcctagcactttgggaggccgaagtgggtggatcacgaggtcaggagttcaagaccagcctggccaacatggtgaaaccccatctctactaaatatacgaaaattagctgggtgtggtggcacgcgcctgtagtcccagctactcgggaggctgaggcagaattgcttgaacctgggaggtggaggttgcagggatctgagaccatgtcattgcactccagcctgggcaacagagcgagacgccatctcaaaaaaaaaaaacctacagagccacacggcctctttctccaccgagtgttggtgtgggagcttgtgttattgtggtgaaatcttggtactttcttgaggcagagagaggctgagcgcctggagagactttcacatgggtcgccatgtccgccgtcggtttcgctgttgtgctccccatctgaaggctggtgccgtccagacaggctggacgcccctttccaccagatccttcctcccgcagcagtttctagttacgttgtactgtgaggtctgtgtccttggttgatggcaaaagtcagccgaattgaaattcagagccatgcctggctccctggagcttctctcctgggcagctgtgatcattgcctctgctgtggtgtgggtggtggaaatggattcctttcatcttgcttgctacaggtgactgtcacgtggagtcctttggagagagggacgtgttaattgatggatgtggctcccatgctgagaaagctcctgggcgtacattgccttagagtttcattggagctgcgttcttttatggtgtctgctaggcagaagtgatgaagacttggaagaaaacccagaaggttttccacttaatttggaaaatgtgcttttcccctcctgtgtcttttgctaaggtccagcctcctgcagcctccccgctctgtggactctggctttgattctttattaggagtccccctgctcccccaaaagatggtgtctaaattatcatccaattggccgaggttttgttttctattaattgtttttattttttattgtggtaaatttatataacataaaatttgccattttaattgttttgttattgttgtttttgagacagggtctcaccccagtgcccaggctggagtgcagtggtgcgatcatggctcactgcagcctcagcctccagggctccagtgatcctctcacctcagcctctctagtagccgggactacaggcatacactaccacatctggctgattttttgtattttttttttattgtagagacccgctatgttgcccaggctggtctcaactcctggactcaagccatcctcccacctcaccctcccaaagtgctgggattacaggcatgagccacaacacccagccattttaatttttttttttttttttgagatggagtctcactctatcgcccaggctggagtgcagtggcgtggtatcaactcactgcaacctctgcctcccaggttcaagcgactctcctgcctcagcctcctcccgagtagctgggattacaggtgcccatcactatgcctggctaatttttgtattttttagcagagacggggtttcaccatgttggccaggctggtcttgaactcctaacctggtgatccgcccgcctcggcctcccaaaatgctgagattacaggtgtgagccaccgtgcccggcctttttttgtttttgagacagggtcttgccctgtcacccagactggagtgcaatggtgggctcttggctcactgcagcctccgcctcccaggctcaagttgtgcacctccacacctggctaactgtattttatgtagagacagatttcaccatgttgcccaggctgggcttgaaatggactcaagcagtccacccacctcagcctcccaaagtgctgagattacaggcgcgagccaccgcacccagcccattttacctattctgcagttgacagttcagtggcattcagtcagttcacgaggtaaccatcactgccattcatctccagactacttcaccttctcggcagatgtccgaaactgtccgcattgaacacactcctcatctccctctgacagccaccattctactttgtatctctctctgccttctctaggtacctcatgtaagtggaattataccaatatttgcccttgtgtgactggcttctttcatgtgacatggtgtcctcaaggttcatctgtgttatagcctgtgtcagaatttccttccttaaagcctgaataataacccgttgtaaaggctgggcgcggtggctcacaccctctaatcccagcattttgggagtccgaggtgggcagatcacttgaggtcaggagtttgagaccagcctggccaacatagtgaaaccctggctctactaaaagtacaaaattagctgggtgtggtggcgcgcacctgtaatcccagttactcaggaggctgaggcaggagaatcgcttgtacccgggaggcagaggttgcagtgaaccaagattgtgcctctgcagtccagcctgggtaacagagtgagacttcctgtctcaaaaaaaaaaaaaatcatcggatggatggacggaccacttcttgttatttatccatccacgggtgctaggtttcttccacctttggttgtcgtgaataaggccactatgaacatttccttccgtggtgaaggttttgtactagtgaggaaaaggcgtgtttgtggtgttgcataggattctggtaagaaagtttgcactaaccataagtatttgtactacattaaaatgaaagctcaggggccgggcgcggtggctcacgcctgtaatcccagcactttgggaggccagggcgggcggatcatgaggtcaggagatcaagaccatcctggccaacatggtgaaaccccgtctctactaaaaataccaaaaaactagccaggtgtggtggcgggcacctgtagtcccagctacttgggaggctgaggcaggagaatggcgtgaacccgggaggcggagcttgcggtgagccgagatcgcttcactgcactcgagcctgggcaacagagcaagactccgtctcacgcaaaactctgtctcacgcaagactccgtctcaaaaaaaaaaagagttcagggtttatgaaactggccagccgcgtaaagtttgctgtgttgtttttgtgcccgggaggagtgtggccagggtgtcacgtcacacagtacacgtttctcagatggtggttctccagactgctgtcccaaagtctgtttttgcatctggttcccacagacccaccctccacggtgagcctgattttggccagggtagctggaatcttgcttgtctttcagcccggcagctgtaccagtccagggtccacagctagtggcttttaggaaggaatttgttcagttggctttgacacatggccccctagggtccacagctctgtagtgatgtggatgttgttatctacaaagacacatgatccttcgtgtccagatgaaagtgatgatgtctttgcagctgcccagcaaggctgtgtgtgtgtgtgtgtgtgtgtgtgtgtgtgtgtgtgtggtgtgtgtgtggtgtgtgtgtgtgtatgggggagggaggcaccctttccatctgggggtgtgtgtgtgtggggtgtgtgtgtgtgtgtgcgcgtgtgtgtggtgtgtggtgtgtgtgtgtgtatgggggaggcaccctttccatctgggtccaagagactgggcctggggaagacgcttctttttatctacttagagactttgttttatttgtatttttttgagacagggtctcactctgtcacccaggctggggtatggtgatatgagcatagctcactgcagcctcggcctcccaggctgaagcgatcctcccacctcagccttctgaatagctgggactgtaggcgtgcgtcaccatactgagctattgttttttttgtttggttggtttaattttttttgatacagatggagtcttgctatgttgcccagactagtctcaaactcctgaactcaagtgattctcccacctcagtttcccgacattctgggatcacaggtgtgagccactgctgtctccctgttttattaactgctgaaagacctagataaagaaagtctgaaaagacttactatcagagcaccatcctaagatgattccctctgactcaatggagagggaggggagcttttccttcaggcctgggtggcaggagcccaggtgctccaggccccatttgccccaggccaaatcactcgggaacttggatgcagctgtctttcagggtaacccaaaggaaccagatccccgcaggcagtaggcttctgggctgtcctctcctcctacgtcagctcagtaagagcccttcgaagggatgctgtgtcggaggccccaaaagcccaggctcatccctgagatgcacagggtgggctgggcttaggcagcgctcgagcatctcctggacggtgaccccagagagtgtggagacggagagtccttgagagtcactgagagacgtggctgccctgccttcccaagaggggctctgagtcattccccacactcacctgcccctacccaccctcacctggcccccagcctcacctacccccacatctgtaccgatccctttacccgcaccttccctacccaccctcacctcccctgtaccttcacctcccccactcacccgcccctgcaccctcacctgtcccccaccttcacctaacccccaccctcacctgccctcccctcacctggcctccttccgttggggaaggggttgtaaggggcggcccccaaactgtctgtcctggtgccctgcagagaaaacagtacgtgagggccgcagtccaaaagcttgagtcctggaaggtggaggagacagggatgtgttgggaagggccccatggtcttggatcccttctcgactgtcaatggggccttcatgggagcgccagtctagtgatgcacagctgggtgcccggcgggtggctgaggaggcctaaagtccgaggcggcaagagctcttccagaggctgttgtcctaatcgctctggcatactcaggcgggcacgtagttaggagctgattggagaggagagacccccacaccaatactgggatttgactttcaggctaaacttgagaagtgtggcctctgctgtcctgccagagctctccagccagtgcccagggctctccagccagtgcccgggggtctccaccagtgcccgggggtctccgccagtgccaggggtctccgccagtgcccaggggtctccgccagtgctcaggagtcttggtttctttgtcttacagccctttgttttgacctctctgagccaaggccaaaacccagacaggcagccccacgacctcagcatcgacatctacagccggacactgttctggacgtgcgaggccaccaataccatcaacgtccacaggctgagcggggaagccatgggggtggtgctgcgtggggaccgcgacaagcccagggccatcgtcgtcaacgcggagcgagggtaggaggccaacgggtgggtgggggtgctgcccgtccaggcgtgcccgccgtgtcttatgccgaatgccagcctctcacaggctggggagactttccacctggggatccaatgggtggctttccagggtcccaaaagcaaacacaggtttttcacagcccgtccgggaaagcagaaagccccaaggggctggaaggggaaagggggagctctgctgagaggttacaaggcagcgctggccgacgggagttgcagttgataggttttgtatcatccttgttaaacttgaaccctgtgcagaaatcccttccacggcatgggggctgcctgttgactcgctcctgttccaccacagggagctcctgggcttcttcctcccagaggcccccgacgctcccacctgttggtcgtcagagcttctggttggtgggaaggcacccaggaccttgaggtctccagagagaaaagccagggaaagagggagaccgaaacccatgtgacatgaaactcaggctccaaactgagcacgggaacgtttggggacaggagcgcgatggccttcctcagatagctggggggctggcatgaagacgggagctacagccagcacaggtcctgggccgggagcccagagattgagccctgactctgtcacttactggccacgtgaccttgggcgggtggcatagcctcttggagactcagtttcctcattggtaggagtgacggccacagtggtgcggcctctgcagcacacggggggctcggtgggcggaagccccgggtctataaggcggctgtgcaggagccagccgagctggtctcccaacagccagggctccggggtccttagcagctgtggggggcctgcacctgtttcccatggctgctgtcagaaattaccagaagccaggtggctgagagtaatggacacttgttctctcacagttcctgagggctgaagcccgagatcgaggtgtgggcagggccctgcgccctctgaaggctctgagggaacctttgggcttctggtggctccaggcaccccttgacttgtggtcctgtcactccagtctctctgtctggctgcacatggcgtggcctcttctgtaccattgaaggacacttcagttggatttagggcctaccctcacccattgtggtcgtatcttgatccttcatgacatttgtaaagaccctgcttccaaataagctcacattctgaggttctggggtgagcgggaatttggagagcattgttcaactagtatagaatgtgacctgtcagcctcgggcagccctgagaggcaggggctttccacagcccagctgggtgccctgggctccgtgctgtccgaggagacgccatccccacacccgtccttcacccgccaccctcccgcaggtacctgtacttcaccaacatgcaggaccgggcagccaagatcgaacgcgcagccctggacggcaccgagcgcgaggtcctcttcaccaccggcctcatccgccctgtggccctggtggtagacaacacactgggcaagctgttctgggtggacgcggacctgaagcgcattgagagctgtgacctgtcaggtacgcgccccggggcctgccctaaccgcagacacccggccttcattgtcagtaatggcagcagctgccacattgtccgagacctgccgtgagcccagtgccgcgccaggggctttgtgtgtagcgtgttttgtcctcacactgacagctgtaggctggggttctgagtgagccccacagggcagaggcagaaaatgagtctcagagagggtgagcgagctgcttggggccccacagcaggagatggagcaggactgcagcctagcctctgcccccagcacctgcgcaagaagctgctctgctctggactgtgttaggctgcgagggctggagagaaatgagagttggtgcttagagagggggcgcaggtccccatggcttttcctcttatgatgaggtagatgggtgaagggaggggccatgcttgcaggggccagtgaccgaggcccgccgttggaactgatggccttcatcccgagcccagcccaggtgggagcagggctttccgagggcttgtcttgggtcggcctgcttccagggactctgctgcagctcccacccctgtccaaagcatggaatcccccaggctccctggcagtcctgtcaacctctgtcctcccaagctgagtgtggggcaagttctggaggtcagcactgctcaggggggcccacgggctgcttgcaggggccaaccgcctgaccctggaggacgccaacatcgtgcagcctctgggcctgaccatccttggcaagcatctctactggatcgaccgccagcagcagatgatcgagcgtgtggagaagaccaccggggacaagcggactcgcatccagggccgtgtcgcccacctcactggcatccatgcagtggaggaagtcagcctggaggagttctgtacgtgggggctggcagtggggtgggcagggtggcctctaaacccgacccctggaggaggctggaggccagtgcaagatcctgtgtggcctcagccaggcggtggtctctgccagatgccaactgttgcccgctggggttcagcgacatgtccgaatgtcccgaggcctctgaggttgttttcttttgccgcagaacaaatcaccacgaacagcgttttaagacaacaccaactctttttttttttttttttttgagtcaggatcttgctctgttgcccaggctggggtgccctggtgcaaacacagttcactgcagcctcgacctctgggcttaattaagtgaacaccttgcctcagcctcccaggtagctgggactacaggtgggcaccaccacacctggctaatttttttttgtagagacggggtttccccatgttgcccaggctggtctgcaactcctgggcacaagctatctgcctgctgtggcctcccaaagtgctaggattataggtgtgagccactggcctgacaacacccacggattgtctctcagttctgtaaggcaaagtccaggcacagcgtggctcacctgggttctctgctcagggtctcacggggccagaatcaaggtgtcaggaacgctgggccctcagcggaggctctgtggagaaattagcttccttgctcactcagcaggtagcagttgtgggatcgaggttctgttttctctctggttattggtcggggaccactctcagctcctagaggccaccacaggtccttgccccgtggccctctctgcctcagcagtgggggctccctgcgtcagtccctcccacaccttgagtctctctgatttgcttctaaagggccctgtgattcggctcagccacctttagattaggttagcctcccctttgatagactccaagtcggctgattaataaccttaatcacatctgcagaatcccttctgccacataaggtcatgacgccgtgctggggactggggtgggaaattacggggtcatttaggattctgcctgccactgccttgctgtgtcccagggcttgggggaggggcctccacagctgggaccacagtccttcctcccctccatggtaaccatctgaggattacttgagaccagcctgggcaacatggtgagaacccatccctacaaaaaatacaaacaaaaagggaccaggctgggcttggtggctcatgcctataatcccagcactttgggagaccaaggtgggctgatcacttgaggttgggagttcgagaccagcctgcccaacatagtgaaatcccgtctctactaaaaatacaaaaattagctgggtgtggtggcaggcgcctgtattcccagctactggggaggctgaggtgggagaattacttgaacctgggaggcggaagttgcagtgagccaaaattacgccactgcactccagcctaggcaatagagtgagactccgtctcaaaaaaaaaaaagggccaggggtggtagtgacaaagagaccctatcccaaaaaaaccgaacactgaatccttgagactgagtaaggacactgtgaaatttttctgggtggggcagggaacagagcgtcttctgtcatttcttccacctgggtgtggtcagctctccctccaagctgcctcctcttcttctcattgtccgggtgttggacacatttggttaactggatagaataacgcgagttcccagggacttggtccatttgctattttattttattttattttattttattttatttatttatttatttatttatttatttattgagatggagtttcgtttttgtcgcccaggctggagtgcagtggcgcgatctcggttcactgcaacctctgcctcccaggttcaagtgattctcctacctcagccttccaagtaactgggattacaggcacccaccaccataccaggctaatttttttgtatttttagtagagacgggttttcgccattttgcccaggctggtcttcaactcctagcctcaggtgatccacgcacctcggcctcccaaagtgctgggattacaggcatgagccaccacgcctggcaccatttgctattttaattcccatgtgtattagtgtcccacggctgctgtaacaaatgaccacaaactggatggcttaaagcaacagaaatggattcccccaatgtgctggagaccagaagcctgcgaccaaactgttgggagggctgtgcttcctctgggggctccagggaggatctatttgttggcccttccagtgctgtgggtgccagcgttccacacttgtggatgcgccgcctcaacctctgcccatcttcatgtgtccatctcctttgtgtctgcgtctttacctcttcttcttgtctgtgttgcctcttataaggacgtttgtcattgggtttagggcccacccaaatcatccgagatgacctcgtcttgagatccttaacctgcaaagaccctttttccaaaaaaaggttatgctcacagattctaggccttaagacatgggtgtatctttctggggggcactatccaaccccttatacaatgaaagacgggaagagggccaggtgtggtagttcacgcctgtaatctcagcactttaggaagctgaagcgggaggatcacttgagcccaggagtttacaagtagctaggcaacatgatgagaccccatttctacaaaaagtgaaaaaaaaaaaaaaaaaaaaaaagccaggtgtggtggctcacacctgtaatcccagcactttgggaggctgaggcaggcagatcacgaggtcaggagattgagaccatcctggctaacacggtgaaaccccgtctctactaaaaatacaaaaaattatggccgggcgcagtggctcccgcctgtaatcccagcactttgggaggccgaggtgggtgaattacaaggtcaagagatcgagaccatcttggctaacacggtgaaaccccatcaagatcacaaggtcaagagatggagaccatcctggctaacacggtgaaaccccgtctctactaaaaatacaaaaaattagccgggcatggtagcgggcgcctgtagtcccagctgctcgggaggctgaggcaggagaatggcgtgaacccgggaggcggagcttgcggtgagccgagatcgctccatgccactgcactccagcctgggtgacagagtgagactccgtctcaaaaaaaaaaaaaaaaaaaaaaaaaaaagaaaattagccaggcacagtggcaggtgcctattgtcccagctacttgggaggctaaggcaggagaatggcatgaacccgggaggtggagtttgcagtgagccgagatcatgccactgcgctccagcctgggcgatagagcaagactctgtctcaaaaaaaaaagccaggcatggtggtgcatgcctgtagtcccagctactcaagaggctgaggcaggagggttgttcgacccacggagatcaaggctacagtgagccatgatcgcaccactgccctccagcctgggtgacagagtgtgaccctgtctcaaagtaagtaaataggaggagagacaagtgggcagttcagactgatggtatgggcacagtagagactggtgcagacaggctggcctgtgatgtcaagcaacttctgtaattgtttccggcatccatttgtgtgtcaatttccgtgtcagtaggaagactctgtaggctgccaagaggaataagtgggaggatcctcccagagaggccgggcctgcaggagggccagttctcatgagttctcatttggcccctaccctccaggctgtggttctgaggtgggagacagagcctgacctctgtttgtcttgttttgtctttgcagcagcccacccatgtgcccgtgacaatggtggctgctcccacatctgtattgccaagggtgatgggacaccacggtgctcatgcccagtccacctcgtgctcctgcagaacctgctgacctgtggaggtaggtgtgacctaggtgctcctttggggtgatggacaggtacctgattctctgcctgctaggctgctgcctggcatccttttaaaatcacagtccctgtggcatccagtttccaaagctgattgtgtcttcctttgccctcctttcttttctactatgtgcattcggtgctatgaattttcctctaagtactgcgtttcctgcatctcacaaattttgttacattttcattttcaggtagtttgaatatttttacacttctcctgagatgacatctttggctcatgtgttatttagaagtgttgcttagtttctaaagagttggggcttttccagctgtctctctgcaactgatttctaatttaattctactgtagtctgagagcttattttatatgatttctgttattttaaatgtgttgggtgtggtgtttttgttgttattgtttttgtgtctttttgttttgttttgcttcgtttgttttgtttttgagacagtgtcttgctctgtcactcaggctggagtgcaatggcgcgatctcagctcaccgcaacctctgcctcccgggttcaagtgatcctcttgcctcagcctcctgagtagctgggattacaggtgcacgccaccatacccagctaatttttgtatttttagtagagacggggtttcaccatgttggtcaggctggtctcgaactcctgacctcgtgatccgcccacctcggcctcccaaagtgctgggattataggcgtgagccactgtgcctggccattaggtgtgttttatcacccagcatcatgcagtttatcttggtgaatgttctgtgtactcttgaaaagaatgtggattctgctgttgttgggtggagtgttccagaaacatcaattagatccagttggttaatagtgctcatcaggttgtctctatccttccttcctgactgcctgcttgagctgtcagttattgacaggggtgtggagtctccaactctaatggtggatttgtttatttctcctagtagttctatctttttctctccttctacccttgatcctcttctccccctagggcttcctggtgttagtggtgggagagtggggtagtgaagaacctggactttagggccaaagaggccagggttcaaatcctggctctgtcacttcccagttgagtgaccctggctggtgcctgaatctctgtgagcctccacttcctcctctgtgaaattgagagcacttacctggcaggctgtcatgggcatcaagtaacagggcactccacctggaccctgacacgtgatgcacaggaatgccagctgctatgccatgggtgtggcagtagtaataaagtgaccatctgtatcctcaccacagtgaagcctgtccagggctttctctcctatgcccccatgcctccaggtggccttggatcctgttggttctgtgctctgctcagcgacctttctcccgtgggagttcctgggggttcagcttcatcctacagacagcagcacacactggctgtgcaccctttttttttttttttttttttttttgagatggagtctcgcttttttcgcgcaggctgaagtgcagtggtgtgatcttggctcactgcaacctctacctcctgggttcaagtgattttcctgcctcaccctcccaagtagctgggattacaggctcccaccaccacgcccggctaatttttgtattttcagtagagatggtgtttcaccatgttggccaggatggtcttgaactcctgacctcaggtgatccgcccacctcagcctcccaaagtgcagggattacaggcgtgagccaccacacccggagtgccggttgtttttagcagtttgtcttgttcctggagagactggctcctgcccaggagctcggggagtagggccgcggggtgctgcctcacacctcgagtttggccgtaagcagaggggacattttgtgactgtccccctcctgagcttcccagcagcttttctccaagttacagcccaaaagctcaggtggatttgcaacccaacggtgtctgtgcacctcccactgatgcccgaactgccctggccaagaaacggggccgtcagaacgctgcactaactgcagccttgggcctccatgccagaggccatgcccttccatccaccaccccctggcctgggccctgggccctcctggctcgggaactccaggccccttcctcacggctcgagagacgtgtatttaccgcacaggtgcttgtcattctcttgtggcctcttctccagggagatcacagaaggacagggcctcactgaggtctcggacatggaccctttgatagtggcaggagccaggctgggcaagaggcggccacagtcacctcagcagtgccatcaccaccgccattcagcccttccctgagccgggcgcgcccctggctctggccccagtgtcccagttacagctcacaggagcttgtggtgcccagcggctgcttctgattgagagtcgaggtcggaggctttgggaggctgagaggctgctcggtttcacaactgctgagggagacttgggctccatctcaggtatgccccatgtcgccctcaacctccagccaccggtcctccgtgtcccccatggccaggcacggcttgcagacatctgtcgttggctcctctcagccgtcgtgggctgaccctggcacgtcctcctgtggctgagcccagtggggacagctgcttccttttattaccctagaactctcgtctttgatcaggccccctcccctatgccacacagtccctgtcactcgggtgagcccagtagtcatggggaaggcctgcgggttccaaacatccaaaggcttgcgtgcagcatgacagcttgaaaccgatgttttttaccttgatcagatttcagcttggcgggggctttgctcagctttcagtgaggcctgggccgatttcccagcatcccctcctgaggccagcctctgtttcctgtgattttctgcacaaagtgggagggaggagtcctaggaaatggggggccacctcgaagcctaggcctcctctggcttctctgtgccagtgcccccacgctttgtgtctgtgtccccagcccatgggactctgctattccctgagtgctgccgcatgcccagcccgcactgaggacgtggagccccgaggggcaggatggcctccatggtcacacgtaggaagtggcctccaccctccgatgatcctctccctcctccctttcagcgccctccccgggggtgtcctcagccctcctgcctgtgctttgtcccgtcttctgcaggcgcctgggacgtgctgacaggtcctctgccggctcctgccttgctatgcgcacgctggtcaccacagaggcctggcccttcttctgtagcagtcccacacccgcaacaggtgtggctgctgaccacctgctttctgcccctctggtcctgaggagggcgcagtgggcactcaggcgtggctgagcagatgtgtgttgccgggaggaggaaggactgctccagtcagggctgaatttcccacccggagcatttctgctgtatttggtgtagcgcctgctgcttaaagctctgattcccagttggcaccctttcccttctgcattgaaaaacatacggatgcatgtcttcttgcagtgaatgtgtattctcccagcctctcttctgggttggggctggaggtggagcggcacacaggagccgcagcgatggaggatgtgcgggtgcagcaccccgtacagcagggatgccaaacccgcgctgagtccctctcaacttctgctttgaagcccagtcacgccattgcctgggttttgctgggcggggctgcgtgtgatgttctcctctgtccctcccccagagccgcccacctgctccccggaccagtttgcatgtgccacaggggagatcgactgtatccccggggcctggcgctgtgacggctttcccgagtgcgatgaccagagcgacgaggagggctgccccgtgtgctccgccgcccagttcccctgcgcgcggggtcagtgtgtggacctgcgcctgcgctgcgacggcgaggcagactgtcaggaccgctcagacgaggcggactgtgacggtgaggccctccccgtcaaggctctgccaagaccctggccctgccctccgggatacgagcttggggctgcctccggcctcacaggagtaggggctctgaaaacctttgcttgcagggagattgccaagtctgtcttttaggcccaacaaggaaaactctgcagttccacccatcctgtcccaccaggtagtgtggcttgaaggcagactgtgagggtctatctcaccttcctgcattaggtcaggagtttcacagaaacctgaggcacattcaggggtgggctgcagaggtccatggctcacaccctggaaaatccgcccccaaaagacagtgctgtctccactgaccagtctgtgggatagtgcttaagcctgagtggtttctatcaacatgtagaatcaggaggtataaagagatttgctcaggcatcctgggccctctctgaccagcaggatcttcctttagatcttgacagtgaaacacatctcttctgtgccccctgtgagttttctttcattcattcattcattcattcattcattcattcattcattcgagacagagtcttgctctgtcacccaggctggagtgccctggtgtaatctcggctcactgcaacctctgcctccagggttcaatcgattctcctgcctcagcctcccgagtagctgggatgacaggtgcgcaccaccatgcctggctaatttttgtatttttagtagagacagggtttcaccatgttggccaggctggtctcgaactcctgacctcaggtgatccgcccgcctcagcctcccaaagtgctgggattacaggcatgagccaccgcgcccggcctgagttttccttttatgaaggacctgcttggttggttgcctgccacatgttgtcagcaccatgggcccaggactgctgaggagctgttgatgccctcgctctcccagagccaccggctctgttagataattcacatgcagtctggccactgtcctacgtcctcattcacaaagagcagacatttcgtagaagatgagggcctgggagtaacctccctgcatgtttttctataaaggcatagtggttaagtccttccagctcattgaccattggagaattttatggaggctgtagactaggggctggtaaactaagggcccaggggccaaatccagcctgccacctacttttgtaaataaagttttcttggtgcacagccatgcccattcattcatttgcacaatgtctgtggctgctttcatgccaaaagcaagagaactgagtggttatgctggagacctacggccttcaaagccccagacctcacgtctggcccttgacagacagagcttccccagccctgctgcgcatcctggcccagcatgtgctgtgtgtgtgatttcagcttgcaggagccgtggttaggaattgtccctgtgttggtccattttgcattgctatgaaggagcacctgaggccgggtagattatgaaggaaagaggtctgtctggctcatggttctgtaggcagcaccagtatggcacccgcatctgctcagcttctagtgaggtctcaggaagctttgactcatggtgaaagtcgaagcgggagcaggtgcatcacatggtgagagagggagcaacggagagagagagagagcgcctctccctcttgccctcaccttgagaggagatgccaggctcctttaagtaaccagctcccatgtgaactcacagtgagagcccatttgctactgcggagagggcaccaggcatctgctcccatgacccaaacactgcccaccaggccctacctccaaccttggggtcatattttattctgttctatgctatgctatgctatgccatgccatgccatgccatgctattcctattctattatttgagacagaatctcgctctgttgcccaggctggagtgcagtggcatgatcttggctcactgcaacctccacctcccaggttcaagcgattctcctgtatcagcctcccgagtagctgggattacaggcacacaccaccacacccggctaatttttgtattttcaatagagatggggtttcaccatgttggccaggctggtctcaaactcctggcctcaagtgatccacctacctcggcctcccaaagtgccatgattacagatgtgagtcactgcgcccagtgagggtcacatttccgttgagatttggaggggcagacgttggagccatctgagccccctcgtcccgctctagcttctcctcccgtgtgccccgcggtgctggtggcaggcccttacgccggttctggctgcatgctctgttccagaagctttcttccctgcttggttaccagaaaatcatcccatccattacaaggacagggtccccttatctcccattcccagggcaggacaccgggggcagggcaggtggggaactgagcaagttctctgggggcaggcgtggctatggctccctctgggtgggcgtctggggaggggtggaggcagccgtcagcgccctggcttgctcttcctccctggccagagactgtggccttgtgctgctcccgtgtgggctgcctgcacctccagtgggttgtgctccctcccctcccctcccctcaagctctgctgagcaccactgccttccacagcccccactctcgggaggcgaggctcctcgtggccattcctgtccttggcacccacccccccaccaacctggtagagccttgggcggggtctgttactccttgcatggcgtagacctccccacagtaggcacctgacacatacctcctggggggcaggcaggaggtgcgttgaggtctcagccctggcagtccctcccctgcgtggcataggcctcgccacagggtcatcgagggtgggtggagactgtactagaccactccccgctggtcctagaaagggtcccatctgtctgctctctgtttggagtccagaccttggttgctgtgccctgcatggtgggctggggggcaccctccagcctctctgagtgcatggcctctccttgcagccatctgcctgcccaaccagttccggtgtgcgagcggccagtgtgtcctcatcaaacagcagtgcgactccttccccgactgtatcgacggctccgacgagctcatgtgtggtgagccagcttctggcacggggaaggggcgtccgggctgggttcccccaggaacgtggagtttaggggaggagacgtgcctttccagcggggctgggggctgtgtgggagactcaggcggctgggaggctccttgcgggaggcagggaagcctttcccagggcagcggccaggaggacagactgtgagctgtgggctcggcggctacagagtctgcctcagtgggcggggctgatggtgtccaggtgcctgcagcacgcacccacccacgggaccttgctgagcagcgtctgtcaggcagcaagattacccgagggctgcagtggtcctgttccctggcagcttactgtctggctgaggaggagtgatgttcacatatgcacacatgtcatgtgcacacacatgtacatgacaacatcccacatgctcctcaaatagcatgacctgtacagtcacggatatagggcctaggggataggaggccaagacagtcagggaagactttccagaggcagtggctcctgaaaggctgtctgattcaggcaggaagggagctgagttcagataggaagtagcaatgagtcattgtgtctggggacatggccactccttcgctgcagagggacctgggctgagagctcctctcttatggctgcagtcgggagagaagtctgttggggggagaagggggcttcctcaagggactccctgtgccctttggcaccttcgtgccaggtcaggcttgaggcctgaaggcagtggtgggggccaccaagggtcgcctcctctgctgggcaagttcccagtctgacgggcctgtgccgtgggccccagctgtgggggcgctgttgatgcgcagccaggcctcgccgccagagcccgcacgcttccattccgctgacttcatcgacgccctcaggatcgctgggccggccctgtgggagagtgaatgtggcttttgccaaagttgagtctggagcctggaaacttccctatgggcagccttgatagtggagtggcccaaggagcccacccagccgaccctgcccctcccgtggctggtgggcggcaccaggggctgcctggctttgctcgttcaccaacatcacctgggctggccagggcgcgctcacttctgccaccaccgagggccctgggcgaaggagtgaataccaggctgccttggcagggatgtgttgagggctgtggggagtcggacagcggcgggggtcagaggaggaggagggtgcaccgtgcaggctgaagggccacgttaccctgaggttggccaggctccccaggcctagcctcccagctcccccactttctccccaccctccaccagtggcaaagccagccccttcagggcgcacggtgtctgcccccaaggagggcccattccgttggggttaatgttggccacctctttctgtttgtctctggcagaaatcaccaagccgccctcagacgacagcccggcccacagcagtgccatcgggcccgtcattggcatcatcctctctctcttcgtcatgggtggtgtctattttgtgtgccagcgcgtggtgtgccagcgctatgcgggggccaacgggcccttcccgcacgagtatgtcagcgggaccccgcacgtgcccctcaatttcatagccccgggcggttcccagcatggccccttcacaggtaaggagcctgagatatggaatgatctggaggaggcaggagagtagtctgggcagctttggggagtggagcagggatgtgctaccccaggccctcttgcacatgtggcagacattgctaatcgatcacagcattcagcctttcccactgagcctgtgcttggcatcagaatccttcaacacagaggcctgcatggctgtagcaacccaccctttggcactgtaggtgtggagaaagctccttggacttgaccttcatattctagtaggacatgtgctgtgttgtccacaaatcctcatgtaccctagaaatgaatgtgggggcggctgggctctctccagagctgaaggaatcactctgtaccatacagcagctttgtcttgagtgcagctgggatttgtggctgagcagttacaattcctacgtggcccaggcaccaggaacgcaggctgtgtttgtagatggctgggcagccgcaccgcagagctgcaccatgctggtttgtatcacatgggtgaccatggtatgtctaagaaggtggagtccctgtgaggtctgcaggtgcccccacagctccaggccaccttgaggattgcctctgcctgcccagccctgagttccctctcccctgtcctgtcccactgtcaccccaagccggcctcattgggagcctgttggatggcagggtatagatgtaacctgattctctctggggagcggggttatctggcttctcaagagctcctaggagcccacagtggtggcaccatcacagtcgcagcagcccccagagaacgcggccctgtctgttcctggcgtgctctgtgctgccccgcctgggttccctgccccagtcgcaggccccttggaggaggtaccatgtgtctcccgtttcacagatgagccccggggagctcactctagtagtggccagagaggcctgcggctcagggagcggggcacatttccaacaggacacaccgccctggtctgagtctcgtgggtagtgggagcagaggagagcgccctatgtctgtggggcggcttggctgagcctggaagccacctgacctcccccgtcccttccctgccaggcatcgcatgcggaaagtccatgatgagctccgtgagcctgatggggggccggggcggggtgcccctctacgaccggaaccacgtcacaggggcctcgtccagcagctcgtccagcacgaaggccacgctgtacccgccggtgaggggcggggccggggaggggcggggcgggatggggctgtgggcccctcccaccgtcagtgctggccaccggaggcttcccgggttcctgggggctgtgccaccgcctctgaggcatgcttgctttcttcccttttcaaacccttctgcttccttctttaatgacattgttgattgtggataatctgaaaactacacaaaaatataaagagccaaaatctcacccaaatccacctcctagagtggctgttgggctccgtcagcatccaggcggccgtctgtgttccgcacggcccagcccatcgatagccgcctgcaccaggcctgtctgccctctgtgagcctccccacagggttccctccacaaacaccctgttctcccacccagggctggctgcttcctggaaaacagctggatggttttgtgcatgacagacaaacacagggtgattttcgtggctaaaatactccctggagcttttggcagggtgaggggctggctccagctgagccacgccttgagtgaaatgactgtgaggagaataaactgccgctgccctccaggatcactggggctggctggggagaacccccgtttctgggagcacagtcccaggatgccaaggcgagcttggtgccgagatgtgaactcctgagtgtaaacagcgggggctgacttgacatgctttgtatgcttttcatttgttcctgcagctgtatgcccctaaggtgagtccagcccccttctgcttcctctggggcctcgccagtgagccccaccttgctggggctggttcctcctgcccttctgggtatccctcacatctggggtcttgtcttcttgttttctttttcttttttttttgagacggagtttcacttttgttgcccaggcttcagtgcaatggtgtgatctctaggctcaccgcaacctctgcctcccaggttcaagcagttcccctgcctcagcctccctagtagctgggattacaggcatgtgccaccacgcccagctaattttgtatttttagtagagatggggtttctccatgttggtcaggctgatcttgaactccctacctcaggtgatccgcccaccttggcctcccaaagtgctgggattacaggcgtgagccaccgcacctggcctttttcttttcttttcttttcttttttctgagacagggtctcgctctgtcacccaggctggagtgcaatggtgtcatcatggctaactgcagcctctaccttctaggctcaagcaatcctcccatctcagcccctaagtagctaggactgcacgcatgcatccccatgcccagctaatatttacattttttgtagagatgaagtttcactatattgcccaggctggtctccaactcctggactcgagcgatcctcctgcctcggcctccccaggtgctgggattacaggcgtgagccaccgtgcctggcctggggtattgtcttcttatggcacctgactgtggtgggccctgggaaggaagtagcagaagagggttcttcttggtttcctggacagtaactgagtgttctggaggccccagggcctggctttgtttagggacaaagggaactggtaaccagaagccgagagtttaaacacccactgcccttcttccctgctcctgctgctgcaacccagcttaaccagccaggagtgctaggaacccaagcagggcccccgagcacacagcaggcagctcacgaattctcttttcctgttctcccttgggagctgggaggatcttaatcaggcaataagagatggcactgagcagccagctaattttttaaatcactttattgtttaaccatatgactcacccacttaaaaaagggtacagttcagtgggttttagtgtattcacagatgtgtgcaaccctcaccacagttaattttagaacattttcctgcccctaaaagaaactctgcatgaagccagctgtttttaaattagcaaagttattttgcatcctttaaatatatgttcatggtacaaaattcaaaagatacagaagagtctgcagtccaaagagactccgcccccatgacgccaagcaggcatccctgggaggcatggcctcctgcagtgtgtttcttctatgtccccccaggggtcatctgtacatatgcaagcatacaagagcgtggactttgttttccaagccagaagataattgtagatttatgtgcagttgtgagaaagagcacagacccatttatcctctgcctggtttcccccagtgctgcctgccatcttgcatgacttccattcctatcataagcaagacactgataacgattctttcaccttattcagattgacataagtgttttttgtttgttcttgagacaaacttcctctgtcacccagtgggagtgcagtggcacaatcacagctcactgcagcctcaaactcctgggctcaagcgattctcctgcctcagtcccctcaagtagctcagatggcaggtgtgcaccatcatgccaggctaatttttaaattttttgtggaggtgaggcctcactaaatttcctgggctagtcttgaactcctgagctaaagtgatcctcctgcctcagcctcccaaagtggtaggattacaggcatgagccactgcgcctgggctgacatatgtgttttcgtaagcccgaaagatagcatctgaagagtcaacattgagccttgccttttgctgctaacgatgtataaaagctgctgttctgagcatttcggaggctcccagctgccgtgtgcaccctgcctagagctctaccgtaacccatctccgggaggaggtgctattgttttcctcattttgcaacaaggaggctgaagaactgagcatgaaccactggcctgggtcgttcggttggtaggcagtggggccaggccatccaactcacaaccaccttctactctgcttcccccgcaccctgaagtttgttctgttttgaggacacagccgtcacattcttggtggctgaacagcactccttgtcaggcgtggctgggcccccactggagggcatcatggtcctctctcctgctgcggttgaaccttggctgtttcaaccactcctgccaagtggccctctgaaagggacagtccatcttttctcagcagagggccacactggcaaaacggtccctggcaccctttctctccacctgtctaatatagagtaaaaatggtatcatgttaagatcttcatttatatttattttatcatgaatgatgtaagcatcattttgtgtgtttaagaacctttgggcccagcgtgatggcttgcagctgtaatctcagcactttaggaggctgagatgagcggatcacttgaggccgggagtttgagaccagcctggccaacatggagaaaccccgtctctagtaaaaatttaaaaattagccgggtatggtgatcccagctacttgggagtctgaagcatgagaattgcttgaacatgggaggcggaggttgcagtgagccgagatcgcgccattgcactccagcctgggcgacagagcgagactctgtctcaaaaaaaaaaaaaaaaaagaaaagaaaagaaattatcaatctcctcttttatggcatatatatatatatatatatatatatatatatatatatatattttttttttttggttatgttcagaaaggccttccctgctctgatcataaaaaacaacttattttcacactctctctcttttttttttgagacagagttttgctcctgttgcccaggctggagtgcagtggcgcaatctcagctcactgtaacctccgcctcccgggttggagtgattctcctgccttaccttcccgagtagctgggattataggcatgcaccaccatgcctggctaattttgtacttttagtagagacgggggtttctccatgttggtcaggctggtctcgaactcgcgacctcaggtgatccacccacctcggcctcccaaagtgctgggattacagacgtgagccaccatgcccagcccacactctctttcttaacgtcctcctcctttcgttttacgttcacatctttaattcttctgggatgtaattagatttgatgagcaaggtgggcatccagcttgtttcttggctgatggcttatgggtggcgtgaattagtcggggtctatcaggaggcagaaactctatgagaatttgaacagagaaagttccgtctacaggcttattaccagggactggaatagcagaaattgaacagtgagatgtacagagaactctaagaatgcaggaataggccaggcatggtggctcacacctgtcatcccagcactttgggagaccaaggcgggtggatcacctgaggtcaggagttcgagaccagcctggccaacatagtgaaaccccatctctactaaaaatacaaaaaaattagctgggtgtggtggcgcatgcctgtaatcccagctactcgggaggctgaggcaggagaatcacttgaacctgggaggcagaggttgcagtgagccgagatcatgccactgtactccagcctgggtggaagagcggaactctgtctgaaaaaaaaaaaaaaaacaagaagttcaacttgaagggaaaaatgccgtattgtctttccctttgttatgtcaccagggcacagtccatcccaggctggcgctgatccacgggctggagaggggctgccccagaagaggacatgccaggaagggcttggctggtgttcaggagcccaggccaggtcaggtcaagaggtgttgaggctggacgggagaggccagctaggggctcatgtaggatatgaggggtcggcccatttcaacgtggaaactgagctcttctgcttctctttcttcttcactgcattaagattcaataccgcttgggaagcaggtatttcccttcctataaaggatggttgggagcctgagtgttgggagaaagtgtagccgctgagttactaacaactagggctgccgtcaagcctatggggaaagagagaagaggacatttggaaggagagagatcaagctgtggcaccctgggagaggaccacagaaaagaggccagtgagggggttccccggtggcatctgaaggtgtggcccaaccaggaggtccagaggctgccagccgagtggcccaggagagggaacctcacaggggctgagtgggacccaagccctatccaccgtcctaaccacccacatttctcgggaacaagacctcccacagtggcctccccggcagtggaaatagccaaactggcaacatggactttcttcaactgcccgggcgatgctgcctcagtgccccagggcaggcaggaagctcccacacccattctggaatgaggggttggaggaaggctgagctgagcaaaggacccatctctgctctggttggtggggagggagcccattatacaagagacccctcagggctcagtgaggggtgacagagacttggggagtagtggctgtcactgcagaggtgagagggtttggagagaaggtacatgcctttttggccacattgagtagcacctggtagccagttagtaacgtgtattggataaacaaaagattaaacggatgcaaaaaaaaatgttggctttgcttctttttacccaaacctcagttccctcaagtagattctgggaacaccccctacctggctggactgttgtgaagtttaaataagccaggttaacttcacctcctcctttaagacacagctcagacactgcctcctccaagaagccccctctggcttcctgtgtgaatatgacggccctctgggctctagggtatcttagaacaatgcttccttatggctttggaaccccgctgtctcctggattgggagcaaatgcaggggaggagccacacctgactaatctctgggtctcccagcacataagtggcataagggcagggctgtgcccgcttcaggcacttactgaaggatgtacttggcagagggtaggcagccggcggatgagcccctcactctccccagctgactgcgtgggcgggaaaggcgggttcaggagacccagcctccctgggctgtcaccacctctgcacatccagccccattgatcaagggttcaatttttggggtcctgttgggaggccaggagactctctccaggcacttcttccaggtctttgtgttagggtgtgtgtgtgtgtgtgtgtgtgtgtgtgtgtgtgttgtttgttttattttatttatttatttatttatttatttatttatttatttattttgagacgcagtctcgctctgttgcccaggttggagggtggtggcatgatctcggctcactgcaagctccgcctcccgggttcacgccattctcctgcctcactcttcctgagtagccggattacaggcgcacgcaccatgcctggctaattattttgtttttttagtagagacagggtttcgccacgttgcccaggctggtcttgaatccctggcctcaagcgatccgcccgcctcagcctcccaaagtgctgggattacaggcgtgagccaccgtgcccgcccagcctaggggtacatgaaacttttttttttttttttttgagacagagtttcactctgtcctcaggctggagtgcagtggcgtgatctcggcgtactgcaatctccgcctcccggttcaagcgattctcctgcctcagcctcccgagtagctgggattgcaggcacgcgccaccacacccagctaatttttgtatttttagtagagacgggctttcaccatgtgggacaggatggtctcgatctcctgacctcgtgatccgcccgcctcagcctccgaaagtgctgggattacaggcctgagccaccgtgcccagccatgatgttttgatacaggcatataacgtataataatcacatcagggtaaatgatgtaaccatcacatcaagcatttatcctttgtgttacaaaaaaaaatctaattatactttcctacttattcttttttttttttttttttgagacggagtctccctcagtcgcccaggctggagtgcagtggcatgatctcagttcactgcaagctctgcctcctagctctgcctcctgggttcatgccattctcctgtctcagcctcgcgagtagctgggactacaggcgcctgccaccgtgcccggctaatttttttttttgtatttttggtagagacagggtttcaccgtgttagccaggatggtctcgatctcctgacctcataatccgcccgtctcggcctcccaaagtgctgggattacaggcatgagccaccgcccccagcctatttattcttaaatgtacaataaattattgttgactccagtcaccctgctgtgctaccaaatacggatcttcttcattctatctaactgtatttctgtacctgttaaccatctctcctccacctcaccccccaaacccactacccttctcagcctctggtaaccatccttctactctctatctctatgagttcaattgtattaatttttagctccccggccgggcacggtggctcacgcctgtaatcccagcacttcaggaggctgaggcaggtggatcacgaggtcaggagtttgagaccagcctggccaacatggtggaaccccatctctactaaaaacacaaaaattagctgggcgtggtggtgggcgcttgtagtcccagctacttgggaggctgaggcaggagaatcgcttgaaactgggaggcagaggttgcagtgagccaagattgcgccactgcactccagtctgggtgacagagtaagattccatcccgaaaaaaaaaaagtttagctcccacaaataagtgagaacacgtgaagtttctctttctgtgcctcgcttgtttcacttaacataatgacctccagttccatccacgttgttgctttgttataaatgacaggatcttggtcaggcgcagtggctcatgcctgtaatcccagcactttgggaggctgaggtggactgatcatgaggtcaagagatcgagaccatcctggctaacacagtgaaaccccgtctctactaaaaatacaagaaattagccgggcgtggtggtgggcacccatttccgccccttctcgggacgctgatgcacgacatattacccatccccggaagactaatcctcccccactctatattgtacctcttcctttctcctccacgcgattccccgagtaacccgtcttccctccctcctcggattacgctcacctttccgcttcaatcacgttgctccgtccccttccccattcgtaccactcctcactttcgtcttcctacccccactatcccttttcgtcctctctattccttacttactcctcccccttctcttcatacttcattccctccgctcttcccactcgcgctcccactttcacctagttgccctcacctacgttgccatctcgccccttcttcagctctcggcctctcacccatctgtcctctctcttacctctctcctcatctcgctcagacatctctctagactatccctcactttaccttctcagtcgtcttcttcctatccttcgttctccatgatcttcacgtcgccatctcttttcgcccctttcatatgtctctcttcatgttctcactatcattctcatgatcactatcgttctcactacttatcactcccctctttcttcatcaattcctctccgtcattctcgtctctctcttacaaccgccttccttgtgctatctaactcaaccatgcctctcctactctctctctatcgcccctccatcgcttatgcatcctcttctattgcacacccgcccctccatcgcttatgcatcctcttctattgcacaccgcccctccatcgcttatgcatcctcttctattgcacatcctcttctattgcac

SEQ ID NO: 12 - DNA, 21 bp, Artificial Sequence
  Artificial sequence is a primer.
ctgagcggaattcgtgagacc

SEQ ID NO: 13 - DNA, 23 bp, Artificial Sequence
  Artificial sequence is a primer.
ttggtctcacgtattccgctcga

SEQ ID NO: 14 - DNA, 20 bp, Artificial Sequence
  Artificial sequence is a primer.
ctcgagaattctggatcctc

SEQ ID NO: 15 - DNA, 22 bp, Artificial Sequence
  Artificial sequence is a primer.
ttgaggatccagaattctcgag

SEQ ID NO: 16 - DNA, 21 bp, Artificial Sequence
  Artificial sequence is a primer.
tgtatgcgaattcgctgcgcg

SEQ ID NO: 17 - DNA, 23 bp, Artificial Sequence
  Artificial sequence is a primer.
ttcgcgcagcgaattcgcataca

SEQ ID NO: 18 - DNA, 21 bp, Artificial Sequence
  Artificial sequence is a primer.
gtccactgaattctcagtgag

SEQ ID NO: 19 - DNA, 23 bp, Artificial Sequence
  Artificial sequence is a primer.
ttgtcactgagaattcagtggac

SEQ ID NO: 20 - DNA, 21 bp, Artificial Sequence
  Artificial sequence is a primer.
gaatccgaattcctggtcagc

SEQ ID NO: 21 - DNA, 23 bp, Artificial Sequence
  Artificial sequence is a primer.
ttgctgaccaggaattcggattc

SEQ ID NO: 22 - DNA, 33 bp, Artificial Sequence
  Artificial sequence is a primer.
cuacuacuacuactgagcggaattcgtgagacc

SEQ ID NO: 23 - DNA, 32 bp, Artificial Sequence
  Artificial sequence is a primer.
cuacuacuacuactcgagaattctggatcctc

SEQ ID NO: 24 - DNA, 33 bp, Artificial Sequence
  Artificial sequence is a primer.
cuacuacuacuatgtatgcgaattcgctgcgcg

SEQ ID NO: 25 - DNA, 33 bp, Artificial Sequence
  Artificial sequence is a primer.
cuacuacuacuagtccactgaattctcagtgag

SEQ ID NO: 26 - DNA, 33 bp, Artificial Sequence
  Artificial sequence is a primer.
cuacuacuacuagaatccgaattcctggtcagc

SEQ ID NO: 27 - DNA, 45 bp, Artificial Sequence
  Artificial sequence is a primer.
aactggaagaattcgcggccgcaggaatttttttttttttttttt

SEQ ID NO: 28 - DNA, 13 bp, Artificial Sequence
  Artificial sequence is a primer.
aattcggcacgag

SEQ ID NO: 29 - DNA, 9 bp, Artificial Sequence
  Artificial sequence is a primer.
ctcgtgccg

SEQ ID NO: 30 - DNA, 14 bp, Artificial Sequence
  Artificial sequence is a primer.
gtacgacggccagt

SEQ ID NO: 31 - DNA, 16 bp, Artificial Sequence
  Artificial sequence is a primer.
aacagctatgaccatg

SEQ ID NO: 32 - DNA, 18 bp, Artificial Sequence
  Artificial sequence is a primer.
ccaagttctgagaagtcc

SEQ ID NO: 33 - DNA, 20 bp, Artificial Sequence
  Artificial sequence is a primer.
aatacctgaaaccatacctg

SEQ ID NO: 34 - DNA, 57 bp, Artificial Sequence
  Artificial sequence is a primer.
agctgctcgtagctgtctctccctggatcacgggtacatgtactggacagactgggt

SEQ ID NO: 35 - DNA, 56 bp, Artificial Sequence
  Artificial sequence is a primer.
tgagacgcccggattgagcgggcagggatagcttattccctgtgccgcattacggc

SEQ ID NO: 36 - DNA, 27 bp, Artificial Sequence
  Artificial sequence is a primer.
agctgctcgtagctgtctctccctgga

SEQ ID NO: 37 - DNA, 27 bp, Artificial Sequence
  Artificial sequence is a primer.
gccgtaatgcggcacagggaataagct

SEQ ID NO: 38 - DNA, 20 bp, Artificial Sequence
  Artificial sequence is a primer.
gagaggctatatccctgggc

SEQ ID NO: 39 - DNA, 20 bp, Artificial Sequence
  Artificial sequence is a primer.
acagcacgtgtttaaagggg

SEQ ID NO: 40 - DNA, 163 bp, Homo sapiens
actaaagcgccgccgccgcgccatggagcccgagtgagctcggcgcgggcccgtccggccgccggacaacatggaggcagctccgcccgggccgccgtggccgctgctgctgctgctgctgctgctgctggcgctgtgcggctgcccggcccccgccgcggcc

SEQ ID NO: 41 - DNA, 419 bp, Homo sapiens
gccccacagcctcgccgctcctgctatttgccaaccgccgggacgtacggctggtggacgccggcggagtcaagctggagtccaccatcgtggtcagcggcctggaggatgcggccgcagtggacttccagttttccaagggagccgtgtactggacagacgtgagcgaggaggccatcaagcagacctacctgaaccagacgggggccgccgtgcagaacgtggtcatctccggcctggtctctcccgacggcctcgcctgcgactgggtgggcaagaagctgtactggacggactcagagaccaaccgcatcgaggtggccaacctcaatggcacatcccggaaggtgctcttctggcaggaccttgaccagccgagggccatcgccttggaccccgctcacgggtaaaccctgctg

SEQ ID NO: 42 - DNA, 221 bp, Homo sapiens
ccccgtcacaggtacatgtactggacagactggggtgagacgccccggattgagcgggcagggatggatggcagcacccggaagatcattgtggactcggacatttactggcccaatggactgaccatcgacctggaggagcagaagctctactgggctgacgccaagctcagcttcatccaccgtgccaacctggacggctcgttccggtaggtacccac

SEQ ID NO: 43 - DNA, 221 bp, Homo sapiens
tccctgactgcaggcagaaggtggtggagggcagcctgacgcaccccttcgccctgacgctctccggggacactctgtactggacagactggcagacccgctccatccatgcctgcaacaagcgcactggggggaagaggaaggagatcctgagtgccctatactcacccatggacatccaggtgctgagccaggagcggcagcctttttgtgagtgccgg

SEQ ID NO: 44 - DNA, 156 bp, Homo sapiens
tttctcagtccacactcgctgtgaggaggacaatggcggctggtcccacctgtgcctgctgtccccaagcgagcctttttacacatgcgcctgccccacgggtgtgcagatgcaggacaacggcaggacgtgtaaggcaggtgaggcggtgggacg

SEQ ID NO: 45 - DNA, 416 bp, Homo sapiens
ctccacaggagccgaggaggtgctgctgctggcccggcggacggacctacggaggatctcgctggacacgccggacttcaccgacatcgtgctgcaggtggacgacatccggcacgccattgccatcgactacgacccgctagagggctatgtctactggacagatgacgaggtgcgggccatccgcagggcgtacctggacgggtctggggcgcagacgctggtcaacaccgagatcaacgaccccgatggcatcgcggtcgactgggtggcccgaaacctctactggaccgacacgggcacggaccgcatcgaggtgacgcgcctcaacggcacctcccgcaagatcctggtgtcggaggacctggacgagccccgagccatcgcactgcaccccgtgatggggtaagacgggc

SEQ ID NO: 46 - DNA, 198 bp, Homo sapiens
ttcttctccagcctcatgtactggacagactggggagagaaccctaaaatcgagtgtgccaacttggatgggcaggagcggcgtgtgctggtcaatgcctccctcgggtggcccaacggcctggccctggacctgcaggaggggaagctctactggggagacgccaagacagacaagatcgaggtgaggctcctgtgg

SEQ ID NO: 47 - DNA, 244 bp, Homo sapiens
ccgtcctgcaggtgatcaatgttgatgggacgaagaggcggaccctcctggaggacaagctcccgcacattttcgggttcacgctgctgggggacttcatctactggactgactggcagcgccgcagcatcgagcgggtgcacaaggtcaaggccagccgggacgtcatcattgaccagctgcccgacctgatggggctcaaagctgtgaatgtggccaaggtcgtcggtgagtccggggggtc

SEQ ID NO: 48 - DNA, 313 bp, Homo sapiens
gttcgcttccaggaaccaacccgtgtgcggacaggaacggggggtgcagccacctgtgcttctgcacaccccacgcaacccggtgtggctgccccatcggcctggagctgctgagtgacatgaagacctgcatcgtgcctgaggcctttttggtcttcaccagcagagccgccatccacaggatctccctcgagaccaataacaacgacgtggccatcccgctcacgggcgtcaaggaggcctcagccctggactttgatgtgtccaacaaccacatctactggacagacgtcagcctgaaggtagcgtgggc

SEQ ID NO: 49 - DNA, 255 bp, Homo sapiens
cctgctgccagaccatcagccgcgccttcatgaacgggagctcggtggagcacgtggtggagtttggccttgactaccccgagggcatggccgttgactggatgggcaagaacctctactgggccgacactgggaccaacagaatcgaagtggcgcggctggacgggcagttccggcaagtcctcgtgtggagggacttggacaacccgaggtcgctggccctggatcccaccaaggggtaagtgtttgcctgtc

SEQ ID NO: 50 - DNA, 210 bp, Homo sapiens
gtgccttccagctacatctactggaccgagtggggcggcaagccgaggatcgtgcgggccttcatggacgggaccaactgcatgacgctggtggacaaggtgggccgggccaacgacctcaccattgactacgctgaccagcgcctctactggaccgacctggacaccaacatgatcgagtcgtccaacatgctgggtgagggccgggct

SEQ ID NO: 51 - DNA, 352 bp, Homo sapiens
gtgttcatgcaggtcaggagcgggtcgtgattgccgacgatctcccgcacccgttcggtctgacgcagtacagcgattatatctactggacagactggaatctgcacagcattgagcgggccgacaagactagcggccggaaccgcaccctcatccagggccacctggacttcgtgatggacatcctggtgttccactcctcccgccaggatggcctcaatgactgtatgcacaacaacgggcagtgtgggcagctgtgccttgccatccccggcggccaccgctgcggctgcgcctcacactacaccctggaccccagcagccgcaactgcagccgtaagtgcctcatggt

SEQ ID NO: 52 - DNA, 225 bp, Homo sapiens
gcctcctctacgcccaccaccttcttgctgttcagccagaaatctgccatcagtcggatgatcccggacgaccagcacagcccggatctcatcctgcccctgcatggactgaggaacgtcaaagccatcgactatgacccactggacaagttcatctactgggtggatgggcgccagaacatcaagcgagccaaggacgacgggacccaggcaggtgccctgtgg

SEQ ID NO: 53 - DNA, 235 bp, Homo sapiens
ctttgtcttacagccctttgttttgacctctctgagccaaggccaaaacccagacaggcagccccacgacctcagcatcgacatctacagccggacactgttctggacgtgcgaggccaccaataccatcaacgtccacaggctgagcggggaagccatgggggtggtgctgcgtggggaccgcgacaagcccagggccatcgtcgtcaacgcggagcgagggtaggaggccaac

SEQ ID NO: 54 - DNA, 218 bp, Homo sapiens
ccaccctcccgcaggtacctgtacttcaccaacatgcaggaccgggcagccaagatcgaacgcgcagccctggacggcaccgagcgcgaggtcctcttcaccaccggcctcatccgccctgtggccctggtggtggacaacacactgggcaagctgttctgggtggacgcggacctgaagcgcattgagagctgtgacctgtcaggtacgcgccccgg

SEQ ID NO: 55 - DNA, 234 bp, Homo sapiens
ggctgcttgcaggggccaaccgcctgaccctggaggacgccaacatcgtgcagcctctgggcctgaccatccttggcaagcatctctactggatcgaccgccagcagcagatgatcgagcgtgtggagaagaccaccggggacaagcggactcgcatccagggccgtgtcgcccacctcactggcatccatgcagtggaggaagtcagcctggaggagttctgtacgtgggggc

SEQ ID NO: 56 - DNA, 157 bp, Homo sapiens
ttgtctttgcagcagcccacccatgtgcccgtgacaatggtggctgctcccacatctgtattgccaagggtgatgggacaccacggtgctcatgcccagtccacctcgtgctcctgcagaacctgctgacctgtggaggtaggtgtgacctaggtgc

SEQ ID NO: 57 - DNA, 272 bp, Homo sapiens
gttctcctctgtccctcccccagagccgcccacctgctccccggaccagtttgcatgtgccacaggggagatcgactgtatccccggggcctggcgctgtgacggctttcccgagtgcgatgaccagagcgacgaggagggctgccccgtgtgctccgccgcccagttcccctgcgcgcggggtcagtgtgtggacctgcgcctgcgctgcgacggcgaggcagactgtcaggaccgctcagacgaggtggactgtgacggtgaggccctcc

SEQ ID NO: 58 - DNA, 134 bp, Homo sapiens
tctccttgcagccatctgcctgcccaaccagttccggtgtgcgagcggccagtgtgtcctcatcaaacagcagtgcgactccttccccgactgtatcgacggctccgacgagctcatgtgtggtgagccagctt

SEQ ID NO: 59 - DNA, 274 bp, Homo sapiens
gtttgtctctggcagaaatcaccaagccgccctcagacgacagcccggcccacagcagtgccatcgggcccgtcattggcatcatcctctctctcttcgtcatgggtggtgtctattttgtgtgccagcgcgtggtgtgccagcgctatgcgggggccaacgggcccttcccgcacgagtatgtcagcgggaccccgcacgtgcccctcaatttcatagccccgggcggttcccagcatggccccttcacaggtaaggagcctgagatatggaa

SEQ ID NO: 60 - DNA, 164 bp, Homo sapiens
cttccctgccaggcatcgcatgcggaaagtccatgatgagctccgtgagcctgatggggggccggggcggggtgcccctctacgaccggaaccacgtcacaggggcctcgtccagcagctcgtccagcacgaaggccacgctgtacccgccggtgaggggcggg

SEQ ID NO: 61 - DNA, 130 bp, Homo sapiens
ttggctctcctcagatcctgaacccgccgccctccccggccacggacccctccctgtacaacatggacatgttctactcttcaaacattccggccactgcgagaccgtacaggtaggacatcccctgcag

SEQ ID NO: 62 - DNA, 496 bp, Homo sapiens
tcaaacattccggccactgcgagaccgtacaggccctacatcattcgaggaatggcgcccccgacgacgccctgcagcaccgacgtgtgtgacagcgactacagcgccagccgctggaaggccagcaagtactacctggatttgaactcggactcagacccctatccacccccacccacgccccacagccagtacctgtcggcggaggacagctgcccgccctcgcccgccaccgagaggagctacttccatctcttcccgccccctccgtccccctgcacggactcatcctgacctcggccgggccactctggcttctctgtgcccctgtaaatagttttaaatatgaacaaagaaaaaaatatattttatgatttaaaaaataaatataattgggattttaaaaacatgagaaatgtgaactgtgatggggtgggcagggctgggagaactttgtacagtggagaaatatttataaacttaattttgtaaaaca

SEQ ID NO: 63 - DNA, 22 bp, Artificial Sequence
  Artificial Sequence is a primer.
ttttgggtacacaattcagtcg

SEQ ID NO: 64 - DNA, 20 bp, Artificial Sequence
  Artificial Sequence is a primer.
aaaactgtgggtgcttctgg

SEQ ID NO: 65 - DNA, 21 bp, Artificial Sequence
  Artificial Sequence is a primer.
gtgattgagccaatcctgaga

SEQ ID NO: 66 - DNA, 21 bp, Artificial Sequence
  Artificial Sequence is a primer.
tgagccaaataaaccccttct

SEQ ID NO: 67 - DNA, 20 bp, Homo sapiens
ctggactacgtggccttctc

SEQ ID NO: 68 - DNA, 19 bp, Homo sapiens
ttcagaagcacttggctgg

SEQ ID NO: 69 - DNA, 20 bp, Homo sapiens
ctcagtgccatgaagatgga

SEQ ID NO: 70 - DNA, 21 bp, Homo sapiens
caagatcactcgatctccagg

SEQ ID NO: 71 - DNA, 20 bp, Homo sapiens
gtttcaggagactcagagtc

SEQ ID NO: 72 - DNA, 20 bp, Homo sapiens
ttctgcaggttgctgttgag

SEQ ID NO: 73 - DNA, 20 bp, Homo sapiens
ttattgtgatttcccgtggc

SEQ ID NO: 74 - DNA, 21 bp, Homo sapiens
gccctctgtcctgacttcagg

SEQ ID NO: 75 - DNA, 20 bp, Homo sapiens
gagaaagaaataaggggacc

SEQ ID NO: 76 - DNA, 20 bp, Homo sapiens
tgctttgtaaagcactgaga

SEQ ID NO: 77 - DNA, 24 bp, Homo sapiens
gaagtacgggcagttcagtggcct

SEQ ID NO: 78 - DNA, 25 bp, Homo sapiens
atacaccaaggtccatgttccccgt

SEQ ID NO: 79 - DNA, 25 bp, Homo sapiens
agcctgggccacagcgtgagactac

SEQ ID NO: 80 - DNA, 25 bp, Homo sapiens
tcccggagcttgcacacccgcttca

SEQ ID NO: 81 - DNA, 20 bp, Homo sapiens
catgtgcccacctcattcat

SEQ ID NO: 82 - DNA, 20 bp, Homo sapiens
caagattctgtagcttctgg

SEQ ID NO: 83 - DNA, 20 bp, Homo sapiens
cagagaagtcaagggacttg

SEQ ID NO: 84 - DNA, 20 bp, Homo sapiens
atcctctcacatcccacact

SEQ ID NO: 85 - DNA, 20 bp, Homo sapiens
caaggctaaaagacgaaaaa

SEQ ID NO: 86 - DNA, 20 bp, Homo sapiens
tcaggagcatttcatctttt

SEQ ID NO: 87 - DNA, 19 bp, Homo sapiens
aagtcgaggctgcaaggag

SEQ ID NO: 88 - DNA, 20 bp, Homo sapiens
gccctgtgttcctttcagta

SEQ ID NO: 89 - DNA, 19 bp, Homo sapiens
aaggtgtgaggatcactgg

SEQ ID NO: 90 - DNA, 17 bp, Homo sapiens
agctcatgggggctatt

SEQ ID NO: 91 - DNA, 20 bp, Homo sapiens
gcttctccgagtgtatcaac

SEQ ID NO: 92 - DNA, 20 bp, Homo sapiens
atggcagaggacttagaaca

SEQ ID NO: 93 - DNA, 24 bp, Homo sapiens
gatcagcgaacttcctctcggctc

SEQ ID NO: 94 - DNA, 24 bp, Homo sapiens
tccacattgaggactgtgggaacg

SEQ ID NO: 95 - DNA, 20 bp, Homo sapiens
gctaatcacagtctaaccga

SEQ ID NO: 96 - DNA, 19 bp, Homo sapiens
ttgcactgtcttggatgca

SEQ ID NO: 97 - DNA, 25 bp, Homo sapiens
gcacagctgtagtggggttctaggc

SEQ ID NO: 98 - DNA, 25 bp, Homo sapiens
caggcgcaaaggacatgcacacggc

SEQ ID NO: 99 - DNA, 25 bp, Homo sapiens
caccgatgagtgcacgttcaaggag

SEQ ID NO: 100 - DNA, 25 bp, Homo sapiens
cagacagagatgctccacgccatac

SEQ ID NO: 101 - DNA, 19 bp, Homo sapiens
tttctgggtgtgtctgaat

SEQ ID NO: 102 - DNA, 20 bp, Homo sapiens
acacagttgctctaaagggt

SEQ ID NO: 103 - DNA, 20 bp, Homo sapiens
catttgggaaatccagaaga

SEQ ID NO: 104 - DNA, 25 bp, Homo sapiens
taggtgtcttattttttgttgcttc

SEQ ID NO: 105 - DNA, 25 bp, Homo sapiens
gacataccatgaacactataagagg

SEQ ID NO: 106 - DNA, 20 bp, Homo sapiens
caacccataccagggataag

SEQ ID NO: 107 - DNA, 21 bp, Homo sapiens
gaacaagaggggtaagttggc

SEQ ID NO: 108 - DNA, 22 bp, Homo sapiens
tgaggacacagatactgatggg

SEQ ID NO: 109 - DNA, 25 bp, Homo sapiens
gaagtgttccctcttaaattctttg

SEQ ID NO: 110 - DNA, 25 bp, Homo sapiens
gaactatattgtagttagtgaggag

SEQ ID NO: 111 - DNA, 18 bp, Homo sapiens
cctgtaacccccagtccc

SEQ ID NO: 112 - DNA, 22 bp, Homo sapiens
tcttgcttcctaagtttctcgg

SEQ ID NO: 113 - DNA, 21 bp, Homo sapiens
actccatccacctcatcactg

SEQ ID NO: 114 - DNA, 20 bp, Homo sapiens
tgctgtttgcctcatctgac

SEQ ID NO: 115 - DNA, 20 bp, Homo sapiens
gtggacaggcatagctgagg

SEQ ID NO: 116 - DNA, 21 bp, Homo sapiens
tgttcactcttctgcctgcag

SEQ ID NO: 117 - DNA, 20 bp, Homo sapiens
agctggactctcacagaatg

SEQ ID NO: 118 - DNA, 20 bp, Homo sapiens
caagaggctggtagaaggtg

SEQ ID NO: 119 - DNA, 24 bp, Homo sapiens
gactccagtctgggcaataaaagc

SEQ ID NO: 120 - DNA, 22 bp, Homo sapiens
ggtggcagcatgacctctaaag

SEQ ID NO: 121 - DNA, 16 bp, Homo sapiens
caggcccagtctcttg

SEQ ID NO: 122 - DNA, 18 bp, Homo sapiens
cgtgtccagatgaaagtg

SEQ ID NO: 123 - DNA, 18 bp, Homo sapiens
acctcacggtgtaatccc

SEQ ID NO: 124 - DNA, 18 bp, Homo sapiens
cttgaagcccatctttgc

SEQ ID NO: 125 - DNA, 23 bp, Homo sapiens
tatttgcaaagcttgagacttct

SEQ ID NO: 126 - DNA, 20 bp, Homo sapiens
aatcactgtgctttgttgcc

SEQ ID NO: 127 - DNA, 20 bp, Homo sapiens
actttattgtcagcgtgggc

SEQ ID NO: 128 - DNA, 18 bp, Homo sapiens
actccctcgatggcttcc

SEQ ID NO: 129 - DNA, 18 bp, Homo sapiens
gagcaggggagagaaggc

SEQ ID NO: 130 - DNA, 20 bp, Homo sapiens
cccactggcttgttttattg

SEQ ID NO: 131 - DNA, 25 bp, Homo sapiens
agccactttattgttattttgatgc

SEQ ID NO: 132 - DNA, 25 bp, Homo sapiens
aagagtgaacaaaagcaaacatacc

SEQ ID NO: 133 - DNA, 18 bp, Homo sapiens
gtggagtgtgggattggg

SEQ ID NO: 134 - DNA, 25 bp, Homo sapiens
tactgttcttgataagtatgtcggc

SEQ ID NO: 135 - DNA, 25 bp, Homo sapiens
atgcttttgcatgattctaattatt

SEQ ID NO: 136 - DNA, 21 bp, Homo sapiens
tcccccaaaagaatgtaaagg

SEQ ID NO: 137 - DNA, 20 bp, Homo sapiens
ctggtcttccttgtgtgctg

SEQ ID NO: 138 - DNA, 18 bp, Homo sapiens
atcacccaggccagggat

SEQ ID NO: 139 - DNA, 24 bp, Homo sapiens
tcagaagcagaactgtttttaaca

SEQ ID NO: 140 - DNA, 22 bp, Homo sapiens
cctgcttgaaagttctagagcc

SEQ ID NO: 141 - DNA, 21 bp, Homo sapiens
caagcccgggttttattgaaa

SEQ ID NO: 142 - DNA, 18 bp, Homo sapiens
gatgccaggaccatggac

SEQ ID NO: 143 - DNA, 24 bp, Homo sapiens
gcatatagaaacaatttattgccg

SEQ ID NO: 144 - DNA, 20 bp, Homo sapiens
ctctgaagcagggaccagag

SEQ ID NO: 145 - DNA, 19 bp, Homo sapiens
ctaccacaccacaccaggc

SEQ ID NO: 146 - DNA, 18 bp, Homo sapiens
caagcgaaagctgccttc

SEQ ID NO: 147 - DNA, 23 bp, Homo sapiens
gttgtcttgacttcaggtctgtc

SEQ ID NO: 148 - DNA, 24 bp, Homo sapiens
ttttccttcaacaatcactactcc

SEQ ID NO: 149 - DNA, 20 bp, Homo sapiens
gcgtggggatatagaggtca

SEQ ID NO: 150 - DNA, 20 bp, Homo sapiens
tacgtggccaagaagctagg

SEQ ID NO: 151 - DNA, 24 bp, Homo sapiens
taatatatccccagtctaaggcat

SEQ ID NO: 152 - DNA, 18 bp, Homo sapiens
agcttgcagatggagccc

SEQ ID NO: 153 - DNA, 25 bp, Homo sapiens
tggttttaaacctttaatgagaaaa

SEQ ID NO: 154 - DNA, 23 bp, Homo sapiens
tgttgatctataccctgtttccg

SEQ ID NO: 155 - DNA, 25 bp, Homo sapiens
aattatttaaaagagaggaaaggca

SEQ ID NO: 156 - DNA, 20 bp, Homo sapiens
tggctgtgaacttcctctga

SEQ ID NO: 157 - DNA, 25 bp, Homo sapiens
ggttacagaaaaacatttgagagat

SEQ ID NO: 158 - DNA, 22 bp, Homo sapiens
tgagctttagttcccttctctg

SEQ ID NO: 159 - DNA, 23 bp, Homo sapiens
ttgaaaaaccatttatttcaccg

SEQ ID NO: 160 - DNA, 18 bp, Homo sapiens
tctgcggctgttggattt

SEQ ID NO: 161 - DNA, 23 bp, Homo sapiens
ttgaaaaaccatttatttcaccg

SEQ ID NO: 162 - DNA, 20 bp, Homo sapiens
tgttctcttctcccagcagg

SEQ ID NO: 163 - DNA, 23 bp, Homo sapiens
ctttattgaaaacattgagtgca

SEQ ID NO: 164 - DNA, 20 bp, Homo sapiens
ttgtcaaattccccccaaaa

SEQ ID NO: 165 - DNA, 16 bp, Homo sapiens
  misc_feature 12: n = A,T,C or G
aaaccacgaccnccaa

SEQ ID NO: 166 - DNA, 20 bp, Homo sapiens
ccctggaaaggtaagatgct

SEQ ID NO: 167 - DNA, 23 bp, Homo sapiens
cttttggtagagacaaggtctca

SEQ ID NO: 168 - DNA, 25 bp, Homo sapiens
tatctgtctgtagtgcttcaaatgt

SEQ ID NO: 169 - DNA, 19 bp, Homo sapiens
gacgaaggtgattcagggc

SEQ ID NO: 170 - DNA, 19 bp, Homo sapiens
actgaagaactcttgtcct

SEQ ID NO: 171 - DNA, 25 bp, Homo sapiens
cagataaaagagtcactatggctca

SEQ ID NO: 172 - DNA, 20 bp, Homo sapiens
cacttctcccactttgtccc

SEQ ID NO: 173 - DNA, 25 bp, Homo sapiens
ttattgataagcattagtgaacccc

SEQ ID NO: 174 - DNA, 20 bp, Homo sapiens
tggcaagttaggcacagtca

SEQ ID NO: 175 - DNA, 21 bp, Homo sapiens
ctatgcccagagatgaacagg

SEQ ID NO: 176 - DNA, 20 bp, Homo sapiens
tccactaagggctatgtcgc

SEQ ID NO: 177 - DNA, 24 bp, Homo sapiens
gccagctttattgagtaaacttcc

SEQ ID NO: 178 - DNA, 22 bp, Homo sapiens
cactggagactacaagtggtgg

SEQ ID NO: 179 - DNA, 20 bp, Homo sapiens
catcccaaccatcactcagt

SEQ ID NO: 180 - DNA, 22 bp, Homo sapiens
ggggactagcttacagatttga

SEQ ID NO: 181 - DNA, 23 bp, Homo sapiens
agactacattttggaaccagtgg

SEQ ID NO: 182 - DNA, 23 bp, Homo sapiens
tgaaaggatatttatagcctgga

SEQ ID NO: 183 - DNA, 20 bp, Homo sapiens
gaaggttttgtccctcgatc

SEQ ID NO: 184 - DNA, 20 bp, Homo sapiens
tgagggttgggaagatcata

SEQ ID NO: 185 - DNA, 18 bp, Homo sapiens
ccttcatagccacacccg

SEQ ID NO: 186 - DNA, 21 bp, Homo sapiens
cagctaactgttgacatgcca

SEQ ID NO: 187 - DNA, 25 bp, Homo sapiens
tctttactgtgcttacaactttcct

SEQ ID NO: 188 - DNA, 20 bp, Homo sapiens
caacagtgcagtcggtatcg

SEQ ID NO: 189 - DNA, 18 bp, Homo sapiens
agatcagcaagcagatag

SEQ ID NO: 190 - DNA, 18 bp, Homo sapiens
cattccacatggatagac

SEQ ID NO: 191 - DNA, 24 bp, Homo sapiens
catacctatgaggtgtgctacagg

SEQ ID NO: 192 - DNA, 21 bp, Homo sapiens
gcattttctcatcatccttgc

SEQ ID NO: 193 - DNA, 20 bp, Homo sapiens
ttacagccaccaaggtttcc

SEQ ID NO: 194 - DNA, 20 bp, Homo sapiens
aggtgtgtgtgccaggttga

SEQ ID NO: 195 - DNA, 25 bp, Homo sapiens
cactgttatctcattaactgtgagg

SEQ ID NO: 196 - DNA, 21 bp, Homo sapiens
tttgattttgtgtctcccaaa

SEQ ID NO: 197 - DNA, 20 bp, Homo sapiens
ccccactcccacttttattt

SEQ ID NO: 198 - DNA, 24 bp, Homo sapiens
ccagtcacctttactagtcctttg

SEQ ID NO: 199 - DNA, 20 bp, Homo sapiens
aggacacagcctgcatctag

SEQ ID NO: 200 - DNA, 20 bp, Homo sapiens
accaggcattgcactaaaag

SEQ ID NO: 201 - DNA, 22 bp, Homo sapiens
gatgggtcacactaacctgtca

SEQ ID NO: 202 - DNA, 24 bp, Homo sapiens
acatttatatttggacatgcaacc

SEQ ID NO: 203 - DNA, 22 bp, Homo sapiens
agcatctttaatgtgtcaggca

SEQ ID NO: 204 - DNA, 18 bp, Homo sapiens
atgtgctgggctggaaag

SEQ ID NO: 205 - DNA, 20 bp, Homo sapiens
tcacattcaaaaatcggcaa

SEQ ID NO: 206 - DNA, 18 bp, Homo sapiens
ctgcctgtgtggtgtcgc

SEQ ID NO: 207 - DNA, 25 bp, Homo sapiens
tgttttatttctcagtacaaagcca

SEQ ID NO: 208 - DNA, 19 bp, Homo sapiens
gacctcctgtgacaccacg

SEQ ID NO: 209 - DNA, 25 bp, Homo sapiens
ccaccaaattatttatagttctgcg

SEQ ID NO: 210 - DNA, 23 bp, Homo sapiens
gtaagattctccactgttgcacc

SEQ ID NO: 211 - DNA, 20 bp, Homo sapiens
cctataatgggctggaccaa

SEQ ID NO: 212 - DNA, 21 bp, Homo sapiens
actcctcatgtgaagtcaccg

SEQ ID NO: 213 - DNA, 20 bp, Homo sapiens
cagtgtgcacgttttcattt

SEQ ID NO: 214 - DNA, 20 bp, Homo sapiens
cagcatcttcagcacttacc

SEQ ID NO: 215 - DNA, 25 bp, Homo sapiens
ctgcatttattatgagaatcaacag

SEQ ID NO: 216 - DNA, 20 bp, Homo sapiens
tgctgctgggagtcagagtc

SEQ ID NO: 217 - DNA, 23 bp, Homo sapiens
cagggcactgagatacacttacc

SEQ ID NO: 218 - DNA, 21 bp, Homo sapiens
aaggatcaagccaggcatttg

SEQ ID NO: 219 - DNA, 20 bp, Homo sapiens
acacatctcttctgtgcccc

SEQ ID NO: 220 - DNA, 18 bp, Homo sapiens
tgaaccctggaggcagag

SEQ ID NO: 221 - DNA, 19 bp, Homo sapiens
cattccccagtttgcagac

SEQ ID NO: 222 - DNA, 19 bp, Homo sapiens
gtgctgggattacaggtgt

SEQ ID NO: 223 - DNA, 20 bp, Homo sapiens
gcagagaagtcctgttagcc

SEQ ID NO: 224 - DNA, 20 bp, Homo sapiens
ccatgctagagaagcacaac

SEQ ID NO: 225 - DNA, 20 bp, Homo sapiens
agtgtggggcaggacctctg

SEQ ID NO: 226 - DNA, 21 bp, Homo sapiens
cagacagatagccctgggttc

SEQ ID NO: 227 - DNA, 20 bp, Homo sapiens
tccctcatccccttgtctgt

SEQ ID NO: 228 - DNA, 19 bp, Homo sapiens
agcccccctggggataatc

SEQ ID NO: 229 - DNA, 19 bp, Homo sapiens
gatgcttacctaccacggc

SEQ ID NO: 230 - DNA, 21 bp, Homo sapiens
aggattcctatctgggctatg

SEQ ID NO: 231 - DNA, 20 bp, Homo sapiens
tggcagaccatgctccgcct

SEQ ID NO: 232 - DNA, 20 bp, Homo sapiens
gagaaggccgggaggctctg

SEQ ID NO: 233 - DNA, 25 bp, Homo sapiens
ctccatcacaaccagatttgaggct

SEQ ID NO: 234 - DNA, 22 bp, Homo sapiens
gggtgtgagctgctgctgaagg

SEQ ID NO: 235 - DNA, 25 bp, Homo sapiens
agtgggaaacctcaggtagctcccg

SEQ ID NO: 236 - DNA, 25 bp, Homo sapiens
cagtttggctcagacatatgggggc

SEQ ID NO: 237 - DNA, 20 bp, Homo sapiens
cattagtagtggggggacag

SEQ ID NO: 238 - DNA, 21 bp, Homo sapiens
caaagcgacagtgagttaggg

SEQ ID NO: 239 - DNA, 20 bp, Homo sapiens
ggagtagaccatgattactg

SEQ ID NO: 240 - DNA, 19 bp, Homo sapiens
catggtctatttattctcg

SEQ ID NO: 241 - DNA, 22 bp, Homo sapiens
cgccctggatcctcacactaca

SEQ ID NO: 242 - DNA, 21 bp, Homo sapiens
gggcatcaggggatgggtaga

SEQ ID NO: 243 - DNA, 23 bp, Homo sapiens
gctcctatctgtgttttgaatgg

SEQ ID NO: 244 - DNA, 22 bp, Homo sapiens
ccgtggcatagataagtaaacg

SEQ ID NO: 245 - DNA, 22 bp, Homo sapiens
cttggagcgctatgaggagggc

SEQ ID NO: 246 - DNA, 23 bp, Homo sapiens
atggcaactgaccttccgtcctg

SEQ ID NO: 247 - DNA, 16 bp, Homo sapiens
ttggagtcacaggggc

SEQ ID NO: 248 - DNA, 17 bp, Homo sapiens
cagcactatccttgggg

SEQ ID NO: 249 - DNA, 21 bp, Homo sapiens
aacaaagctgcttagcacctg

SEQ ID NO: 250 - DNA, 20 bp, Homo sapiens
gatgaggaccaactggtgac

SEQ ID NO: 251 - DNA, 20 bp, Homo sapiens
ttttccaataatgtgacttc

SEQ ID NO: 252 - DNA, 20 bp, Homo sapiens
caatcccaaccgtaacaggc

SEQ ID NO: 253 - DNA, 19 bp, Homo sapiens
cttgatctcgcccaggaac

SEQ ID NO: 254 - DNA, 20 bp, Homo sapiens
gctcgctgaaggatgaagac

SEQ ID NO: 255 - DNA, 17 bp, Homo sapiens
gaatcgcttgaacccag

SEQ ID NO: 256 - DNA, 17 bp, Homo sapiens
ccaggtggtcttaacgg

SEQ ID NO: 257 - DNA, 21 bp, Homo sapiens
  misc_feature 8: n = A,T,C or G
gaacgttnttcatgtaggcgt

SEQ ID NO: 258 - DNA, 16 bp, Homo sapiens
taatggtcgctgtccc

SEQ ID NO: 259 - DNA, 22 bp, Homo sapiens
agggaaaatggtatgtggggag

SEQ ID NO: 260 - DNA, 18 bp, Homo sapiens
gcagtgtgtgaaggcagg

SEQ ID NO: 261 - DNA, 24 bp, Homo sapiens
agtggacaaaatgaggaaaacagg

SEQ ID NO: 262 - DNA, 23 bp, Homo sapiens
ccaacacagtttgctcacatgcc

SEQ ID NO: 263 - DNA, 20 bp, Homo sapiens
tgacatctttgcattatggc

SEQ ID NO: 264 - DNA, 20 bp, Homo sapiens
agttatcccacctgataccg

SEQ ID NO: 265 - DNA, 20 bp, Homo sapiens
agctcttgcttctcagtcca

SEQ ID NO: 266 - DNA, 24 bp, Homo sapiens
caaaagttgtttctgtgtttgttc

SEQ ID NO: 267 - DNA, 22 bp, Homo sapiens
gcctctcaaagtagttggaacc

SEQ ID NO: 268 - DNA, 23 bp, Homo sapiens
tgtgtatccatagtgcaaaacag

SEQ ID NO: 269 - DNA, 19 bp, Homo sapiens
ctcaaggccaggcatcact

SEQ ID NO: 270 - DNA, 19 bp, Homo sapiens
ggactcttccatgccagtg

SEQ ID NO: 271 - DNA, 19 bp, Homo sapiens
aatgatgatctcaactctg

SEQ ID NO: 272 - DNA, 19 bp, Homo sapiens
actgaagaactcttgtcct

SEQ ID NO: 273 - DNA, 23 bp, Homo sapiens
gacatctgttagtctcataattc

SEQ ID NO: 274 - DNA, 18 bp, Homo sapiens
ggtaacagtgtcttgctt

SEQ ID NO: 275 - DNA, 21 bp, Homo sapiens
ctatgtacaaaacaggaagag

SEQ ID NO: 276 - DNA, 19 bp, Homo sapiens
atcctagtttcctctcctt

SEQ ID NO: 277 - DNA, 23 bp, Homo sapiens
gtaaatgagaaacagacaaatga

SEQ ID NO: 278 - DNA, 23 bp, Homo sapiens
ctattggatgtgatatgttatgg

SEQ ID NO: 279 - DNA, 22 bp, Homo sapiens
aagtagaaacaaaatgagggac

SEQ ID NO: 280 - DNA, 18 bp, Homo sapiens
cctaccccaaggtaacag

SEQ ID NO: 281 - DNA, 22 bp, Homo sapiens
acttcctataaatggaggtgag

SEQ ID NO: 282 - DNA, 18 bp, Homo sapiens
gaggagcttcaagaggaa

SEQ ID NO: 283 - DNA, 23 bp, Homo sapiens
catactcctagactcaaggaatc

SEQ ID NO: 284 - DNA, 23 bp, Homo sapiens
gaatgatgtacatgaattctttg

SEQ ID NO: 285 - DNA, 20 bp, Homo sapiens
gtgttgaggagaaaagcact

SEQ ID NO: 286 - DNA, 19 bp, Homo sapiens
ctcccagtagtcacattcc

SEQ ID NO: 287 - DNA, 23 bp, Homo sapiens
caagttacaaataacttaagccg

SEQ ID NO: 288 - DNA, 23 bp, Homo sapiens
caagaccctatctctacaaaaac

SEQ ID NO: 289 - DNA, 24 bp, Homo sapiens
tttattagaagtgactcttggccc

SEQ ID NO: 290 - DNA, 20 bp, Homo sapiens
gactacctgccctcagcttg

SEQ ID NO: 291 - DNA, 20 bp, Homo sapiens
ttctcatgtacaaagcggtc

SEQ ID NO: 292 - DNA, 20 bp, Homo sapiens
ccactggcttctctcttttt

SEQ ID NO: 293 - DNA, 18 bp, Homo sapiens
caccagaaggttggggtg

SEQ ID NO: 294 - DNA, 21 bp, Homo sapiens
actattacgacatgaacgcgg

SEQ ID NO: 295 - DNA, 18 bp, Homo sapiens
ctcatgctggatgacccc

SEQ ID NO: 296 - DNA, 24 bp, Homo sapiens
ttgcctttcttgaaacttaattcc

SEQ ID NO: 297 - DNA, 19 bp, Homo sapiens
tcacagccttcagtcaggg

SEQ ID NO: 298 - DNA, 18 bp, Homo sapiens
acatgctgtggcaccatg

SEQ ID NO: 299 - DNA, 18 bp, Homo sapiens
cctgagctactgccacag

SEQ ID NO: 300 - DNA, 20 bp, Homo sapiens
ccctgacttggacagtgtcc

SEQ ID NO: 301 - DNA, 18 bp, Homo sapiens
tcagagtcactcctgccc

SEQ ID NO: 302 - DNA, 22 bp, Homo sapiens
caaattcaagctcatccagacc

SEQ ID NO: 303 - DNA, 18 bp, Homo sapiens
cggcatttcatccaggac

SEQ ID NO: 304 - DNA, 20 bp, Homo sapiens
ggtgtaggaggtgcgacaat

SEQ ID NO: 305 - DNA, 20 bp, Homo sapiens
ttccatttattgagcacctg

SEQ ID NO: 306 - DNA, 20 bp, Homo sapiens
cttaagccactgtgttttgg

SEQ ID NO: 307 - DNA, 20 bp, Homo sapiens
cctcctacacctgcaaaagc

SEQ ID NO: 308 - DNA, 19 bp, Homo sapiens
tggaagaaccccagaggac

SEQ ID NO: 309 - DNA, 23 bp, Homo sapiens
aaagcacaaaagtaacagcaaca

SEQ ID NO: 310 - DNA, 20 bp, Homo sapiens
gtgtgtgggccacaatattg

SEQ ID NO: 311 - DNA, 20 bp, Homo sapiens
agagcacctttcctcagcac

SEQ ID NO: 312 - DNA, 20 bp, Homo sapiens
agaatctcatcacaggggcg

SEQ ID NO: 313 - DNA, 25 bp, Homo sapiens
aaaaaggacagtgtctaaaatttga

SEQ ID NO: 314 - DNA, 25 bp, Homo sapiens
aattgtttttgtttgttttttgagt

SEQ ID NO: 315 - DNA, 22 bp, Homo sapiens
gatttagggagtacaagtgcgg

SEQ ID NO: 316 - DNA, 25 bp, Homo sapiens
ggggacaaattatactttattcagg

SEQ ID NO: 317 - DNA, 22 bp, Homo sapiens
ccatcatcatattggtgtgacc

SEQ ID NO: 318 - DNA, 18 bp, Homo sapiens
tggctgcccaagaagaag

SEQ ID NO: 319 - DNA, 24 bp, Homo sapiens
ttaagatgccattaaactcatgac

SEQ ID NO: 320 - DNA, 20 bp, Homo sapiens
ccaaggagatgaccaagtgg

SEQ ID NO: 321 - DNA, 22 bp, Homo sapiens
ccatctcttttatcagggttgg

SEQ ID NO: 322 - DNA, 24 bp, Homo sapiens
ctctgtgcaagtaagcatcttaca

SEQ ID NO: 323 - DNA, 20 bp, Homo sapiens
cgactgtgtattttccacag

SEQ ID NO: 324 - DNA, 20 bp, Homo sapiens
agaagcccatatcaatgcac

SEQ ID NO: 325 - DNA, 23 bp, Homo sapiens
agcttaaagtaggacaaccatgg

SEQ ID NO: 326 - DNA, 20 bp, Homo sapiens
ggatgcttcactccagaaag

SEQ ID NO: 327 - DNA, 21 bp, Homo sapiens
tgttgtttatttccacctgcc

SEQ ID NO: 328 - DNA, 18 bp, Homo sapiens
agagtggctgcaggccag

SEQ ID NO: 329 - DNA, 25 bp, Homo sapiens
tttttttttttacacgaatttgagg

SEQ ID NO: 330 - DNA, 23 bp, Homo sapiens
tgaggaagtaaaaacaggtcatc

SEQ ID NO: 331 - DNA, 23 bp, Homo sapiens
atgaaatcttaagcagaatccca

SEQ ID NO: 332 - DNA, 20 bp, Homo sapiens
cacagagtcccagggtctgt

SEQ ID NO: 333 - DNA, 25 bp, Homo sapiens
aaaggcctttatttatctctctctg

SEQ ID NO: 334 - DNA, 18 bp, Homo sapiens
gcctcagagctggtgggt

SEQ ID NO: 335 - DNA, 25 bp, Homo sapiens
gcttctaagtcttagagtcagctgg

SEQ ID NO: 336 - DNA, 19 bp, Homo sapiens
agcccacagtcagcctacc

SEQ ID NO: 337 - DNA, 20 bp, Homo sapiens
ttggttaaatgatgcccaga

SEQ ID NO: 338 - DNA, 18 bp, Homo sapiens
tggtcccactcacatccc

SEQ ID NO: 339 - DNA, 19 bp, Homo sapiens
acacagcatgcagggagag

SEQ ID NO: 340 - DNA, 19 bp, Homo sapiens
atccctggtgcttaggtgg

SEQ ID NO: 341 - DNA, 21 bp, Homo sapiens
gatggaagtagctcctctcgg

SEQ ID NO: 342 - DNA, 21 bp, Homo sapiens
ggaaggccagcaagtactacc

SEQ ID NO: 343 - DNA, 18 bp, Homo sapiens
ccggtgcttggaaagatg

SEQ ID NO: 344 - DNA, 20 bp, Homo sapiens
gaagtgtctctgttggggga

SEQ ID NO: 345 - DNA, 22 bp, Homo sapiens
ttacaggcatgagtcactacgc

SEQ ID NO: 346 - DNA, 21 bp, Homo sapiens
accactctcacagcccttaca

SEQ ID NO: 347 - DNA, 18 bp, Homo sapiens
ccctccctccacacacac

SEQ ID NO: 348 - DNA, 20 bp, Homo sapiens
gctcactgaactttcagggc

SEQ ID NO: 349 - DNA, 20 bp, Homo sapiens
agatacgggcaaaacactgg

SEQ ID NO: 350 - DNA, 21 bp, Homo sapiens
gttgaatatagagcagggccc

SEQ ID NO: 351 - DNA, 20 bp, Homo sapiens
ttctgaggtcagggctgtct

SEQ ID NO: 352 - DNA, 21 bp, Homo sapiens
agcttggaaaatctcgtgtca

SEQ ID NO: 353 - DNA, 18 bp, Homo sapiens
actcagtccctcccaccc

SEQ ID NO: 354 - DNA, 20 bp, Homo sapiens
tcctctcactccttcccaga

SEQ ID NO: 355 - DNA, 19 bp, Homo sapiens
gtgatcacggctcaacctg

SEQ ID NO: 356 - DNA, 18 bp, Homo sapiens
tggaggactgcttgagcc

SEQ ID NO: 357 - DNA, 19 bp, Homo sapiens
ctgcagctgcctcagtttc

SEQ ID NO: 358 - DNA, 20 bp, Homo sapiens
tcaaaagtgctggtgacagc

SEQ ID NO: 359 - DNA, 20 bp, Homo sapiens
atttccagagccagctcaaa

SEQ ID NO: 360 - DNA, 25 bp, Homo sapiens
ctttaatgttgtgatgacacaaagc

SEQ ID NO: 361 - DNA, 20 bp, Homo sapiens
gatcatgcactgttgaccac

SEQ ID NO: 362 - DNA, 25 bp, Homo sapiens
tacatttgaaacatttaaaacctga

SEQ ID NO: 363 - DNA, 24 bp, Homo sapiens
aactgagctgtaaccagactggga

SEQ ID NO: 364 - DNA, 22 bp, Homo sapiens
tggaacagtctggtcctgatgg

SEQ ID NO: 365 - DNA, 25 bp, Homo sapiens
ttatccctttattgtttctcctttg

SEQ ID NO: 366 - DNA, 24 bp, Homo sapiens
tggtcacctgtatttattgctagg

SEQ ID NO: 367 - DNA, 22 bp, Homo sapiens
tcttcaaagcctctgcagtacc

SEQ ID NO: 368 - DNA, 22 bp, Homo sapiens
ctcatctccaacctgtctaacc

SEQ ID NO: 369 - DNA, 24 bp, Homo sapiens
gtggctgcagctaatgtaagacac

SEQ ID NO: 370 - DNA, 24 bp, Homo sapiens
cagcagagacaatggcgtaagtcc

SEQ ID NO: 371 - DNA, 20 bp, Homo sapiens
ctgattgagaaccagaacag

SEQ ID NO: 372 - DNA, 20 bp, Homo sapiens
taaagccctataacctctcc

SEQ ID NO: 373 - DNA, 20 bp, Homo sapiens
tagtaagggaccttcaccag

SEQ ID NO: 374 - DNA, 20 bp, Homo sapiens
agatgtttggtatgacttgg

SEQ ID NO: 375 - DNA, 20 bp, Homo sapiens
gatgattaaactctcctggc

SEQ ID NO: 376 - DNA, 20 bp, Homo sapiens
gagacagctaagcactcatg

SEQ ID NO: 377 - DNA, 19 bp, Homo sapiens
gaggtggtgggcacctgta

SEQ ID NO: 378 - DNA, 20 bp, Homo sapiens
agaggggaggaacacacctt

SEQ ID NO: 379 - DNA, 20 bp, Homo sapiens
gaccagagtctgcccagaag

SEQ ID NO: 380 - DNA, 19 bp, Homo sapiens
tccccagctctatcccaac

SEQ ID NO: 381 - DNA, 20 bp, Homo sapiens
ggagggatggacaagtctga

SEQ ID NO: 382 - DNA, 20 bp, Homo sapiens
gtccagctcgctgactatcc

SEQ ID NO: 383 - DNA, 20 bp, Homo sapiens
tcaaaacacagtcatctcca

SEQ ID NO: 384 - DNA, 20 bp, Homo sapiens
gcaaaggctttaccatattg

SEQ ID NO: 385 - DNA, 16 bp, Homo sapiens
gctcagcacccccatt

SEQ ID NO: 386 - DNA, 16 bp, Homo sapiens
tccctgctcgggaaac

SEQ ID NO: 387 - DNA, 20 bp, Homo sapiens
gttctccagagagacagcac

SEQ ID NO: 388 - DNA, 19 bp, Homo sapiens
gagagcaacactattgccc

SEQ ID NO: 389 - DNA, 21 bp, Homo sapiens
tatagacttcagccctgctgc

SEQ ID NO: 390 - DNA, 20 bp, Homo sapiens
cctctgtaggatgcagttgg

SEQ ID NO: 391 - DNA, 20 bp, Homo sapiens
ttgctacgcactcctctact

SEQ ID NO: 392 - DNA, 20 bp, Homo sapiens
gtgaaggcaggaaatgtgac

SEQ ID NO: 393 - DNA, 20 bp, Homo sapiens
atcctagaccagaggagccc

SEQ ID NO: 394 - DNA, 20 bp, Homo sapiens
ctccccctggtccagttatt

SEQ ID NO: 395 - DNA, 20 bp, Homo sapiens
aactttcatttgccaaggga

SEQ ID NO: 396 - DNA, 20 bp, Homo sapiens
agcagatctgctcttgcgat

SEQ ID NO: 397 - DNA, 20 bp, Homo sapiens
acagttgtcatcggtaggca

SEQ ID NO: 398 - DNA, 22 bp, Homo sapiens
aaaagtatgaatgggatggagc

SEQ ID NO: 399 - DNA, 20 bp, Homo sapiens
gtgcaggtggcgtttatttt

SEQ ID NO: 400 - DNA, 21 bp, Homo sapiens
ccctatatctccgtgtgctcc

SEQ ID NO: 401 - DNA, 21 bp, Homo sapiens
gctctagtgggaaacctcagg

SEQ ID NO: 402 - DNA, 20 bp, Homo sapiens
gaattccaggctcttgcttg

SEQ ID NO: 403 - DNA, 20 bp, Homo sapiens
ggtttggtctcaaaggcaaa

SEQ ID NO: 404 - DNA, 20 bp, Homo sapiens
ccagtacatggtggtcacca

SEQ ID NO: 405 - DNA, 20 bp, Homo sapiens
gctgccttggaatttctgtt

SEQ ID NO: 406 - DNA, 18 bp, Homo sapiens
gtgctgtggtggggaaag

SEQ ID NO: 407 - DNA, 20 bp, Homo sapiens
attcaagctcatccagaccc

SEQ ID NO: 408 - DNA, 20 bp, Homo sapiens
ggactggccctttgaaactc

SEQ ID NO: 409 - DNA, 22 bp, Homo sapiens
atattgaccgtgcacaaatacg

SEQ ID NO: 410 - DNA, 21 bp, Homo sapiens
agacctgggaaaagtggagaa

SEQ ID NO: 411 - DNA, 20 bp, Homo sapiens
attggcagtggaaaatgctt

SEQ ID NO: 412 - DNA, 25 bp, Homo sapiens
ttaatcttttgtcaacttcctgatt

SEQ ID NO: 413 - DNA, 23 bp, Homo sapiens
tctgtcctcctttcaccggaagc

SEQ ID NO: 414 - DNA, 29 bp, Homo sapiens
ggataaagaaactccgctctgctggtaga

SEQ ID NO: 415 - DNA, 25 bp, Homo sapiens
tcagggcctgtgttgccgcactctg

SEQ ID NO: 416 - DNA, 25 bp, Homo sapiens
agcgatgtaaagggtaccagtgccg

SEQ ID NO: 417 - DNA, 18 bp, Homo sapiens
aggcatgcaagcttctta

SEQ ID NO: 418 - DNA, 18 bp, Homo sapiens
ccgggaggagacatctat

SEQ ID NO: 419 - DNA, 19 bp, Homo sapiens
tggtaagcacagaaaatgc

SEQ ID NO: 420 - DNA, 18 bp, Homo sapiens
aatggatgggggattatt

SEQ ID NO: 421 - DNA, 18 bp, Homo sapiens
ctggacgttatgtctgcc

SEQ ID NO: 422 - DNA, 18 bp, Homo sapiens
agaggcccagtcacagat

SEQ ID NO: 423 - DNA, 19 bp, Homo sapiens
atcactctgaactgccact

SEQ ID NO: 424 - DNA, 20 bp, Homo sapiens
cccttctgtttttctgtttt

SEQ ID NO: 425 - DNA, 18 bp, Homo sapiens
caagctttgaaggaagag

SEQ ID NO: 426 - DNA, 19 bp, Homo sapiens
taggacgttaagtgaggac

SEQ ID NO: 427 - DNA, 18 bp, Homo sapiens
gctctgcagtgggtaaaa

SEQ ID NO: 428 - DNA, 18 bp, Homo sapiens
actctccaagactgtgcg

SEQ ID NO: 429 - DNA, 18 bp, Homo sapiens
ccctttctgaggcaagat

SEQ ID NO: 430 - DNA, 18 bp, Homo sapiens
gaccacctgggagagaac

SEQ ID NO: 431 - DNA, 18 bp, Homo sapiens
cgctatgagtcccatctg

SEQ ID NO: 432 - DNA, 18 bp, Homo sapiens
gatcagctgcaatgaagg

SEQ ID NO: 433 - DNA, 18 bp, Homo sapiens
ttgagtacacggggtgac

SEQ ID NO: 434 - DNA, 18 bp, Homo sapiens
cgcaggactgaaagatga

SEQ ID NO: 435 - DNA, 18 bp, Homo sapiens
acctgtctcctctcctgg

SEQ ID NO: 436 - DNA, 18 bp, Homo sapiens
tgcttttcttctgtggga

SEQ ID NO: 437 - DNA, 18 bp, Homo sapiens
atgaccagcaagcattgt

SEQ ID NO: 438 - DNA, 18 bp, Homo sapiens
gtactgggattacaggcg

SEQ ID NO: 439 - DNA, 18 bp, Homo sapiens
gcagaaggtcctttggat

SEQ ID NO: 440 - DNA, 18 bp, Homo sapiens
tttgcaggattcatgctt

SEQ ID NO: 441 - DNA, 19 bp, Homo sapiens
cgacattcttttctggagg

SEQ ID NO: 442 - DNA, 19 bp, Homo sapiens
acctttgcatgttggtttt

SEQ ID NO: 443 - DNA, 18 bp, Homo sapiens
gcacttttccttccttcc

SEQ ID NO: 444 - DNA, 18 bp, Homo sapiens
tgctttgctttcttctgg

SEQ ID NO: 445 - DNA, 19 bp, Homo sapiens
acagctccagagagaagga

SEQ ID NO: 446 - DNA, 19 bp, Homo sapiens
gcagtcacttgaaaccaga

SEQ ID NO: 447 - DNA, 18 bp, Homo sapiens
aggcatcaagctttcctt

SEQ ID NO: 448 - DNA, 18 bp, Homo sapiens
ggtttagagaaccgagcc

SEQ ID NO: 449 - DNA, 18 bp, Homo sapiens
gtggtgctgcaagttacc

SEQ ID NO: 450 - DNA, 18 bp, Homo sapiens
ggaatccctttctttcca

SEQ ID NO: 451 - DNA, 18 bp, Homo sapiens
gaccatttgttacgcagc

SEQ ID NO: 452 - DNA, 19 bp, Homo sapiens
gatgggtgtgaatgaacaa

SEQ ID NO: 453 - DNA, 19 bp, Homo sapiens
ctcaagcttctgttcatgc

SEQ ID NO: 454 - DNA, 18 bp, Homo sapiens
gctgtgagtgtcttggct

SEQ ID NO: 455 - DNA, 18 bp, Homo sapiens
tacagaaaaccgcagctc

SEQ ID NO: 456 - DNA, 18 bp, Homo sapiens
gccaccaaaggaaagatt

SEQ ID NO: 457 - DNA, 18 bp, Homo sapiens
aaaaggagggaatcatgg

SEQ ID NO: 458 - DNA, 18 bp, Homo sapiens
tcacttagcaggaggcag

SEQ ID NO: 459 - DNA, 18 bp, Homo sapiens
ctgagcatccgatgagac

SEQ ID NO: 460 - DNA, 18 bp, Homo sapiens
gtgcaaaatgagcagctt

SEQ ID NO: 461 - DNA, 18 bp, Homo sapiens
tctaaccccttactgggc

SEQ ID NO: 462 - DNA, 18 bp, Homo sapiens
tcctcaaactgggaatga

SEQ ID NO: 463 - DNA, 18 bp, Homo sapiens
tttacacaggaccaggga

SEQ ID NO: 464 - DNA, 18 bp, Homo sapiens
atctcccccactcagaag

SEQ ID NO: 465 - DNA, 18 bp, Homo sapiens
gtccacgggctttattct

SEQ ID NO: 466 - DNA, 22 bp, Homo sapiens
tgagcataaatttcattagctg

SEQ ID NO: 467 - DNA, 20 bp, Homo sapiens
ggaagagcaaaataaatcca

SEQ ID NO: 468 - DNA, 19 bp, Homo sapiens
ggtgcacagaattgttcat

SEQ ID NO: 469 - DNA, 18 bp, Homo sapiens
agcacgcttatttcatgg

SEQ ID NO: 470 - DNA, 18 bp, Homo sapiens
gtaacaccagcagggaca

SEQ ID NO: 471 - DNA, 18 bp, Homo sapiens
tcctgctgcattatggat

SEQ ID NO: 472 - DNA, 18 bp, Homo sapiens
gggggtgagaagtaggaa

SEQ ID NO: 473 - DNA, 18 bp, Homo sapiens
atggggattaaatacggg

SEQ ID NO: 474 - DNA, 18 bp, Homo sapiens
agctagcattgggctctt

SEQ ID NO: 475 - DNA, 18 bp, Homo sapiens
ctgaggagaagaggctgg

SEQ ID NO: 476 - DNA, 18 bp, Homo sapiens
cgccttacaaggcaagta

SEQ ID NO: 477 - DNA, 18 bp, Homo sapiens
aggatgcttgctagggtt

SEQ ID NO: 478 - DNA, 18 bp, Homo sapiens
cacaagtgtctggaaggc

SEQ ID NO: 479 - DNA, 18 bp, Homo sapiens
ggtctcaggagcccttta

SEQ ID NO: 480 - DNA, 21 bp, Homo sapiens
acatgccactcttctcactaa

SEQ ID NO: 481 - DNA, 18 bp, Homo sapiens
acttaaccaaggatgggg

SEQ ID NO: 482 - DNA, 18 bp, Homo sapiens
caacccacgagcataaga

SEQ ID NO: 483 - DNA, 18 bp, Homo sapiens
taggctctgcactcttgg

SEQ ID NO: 484 - DNA, 18 bp, Homo sapiens
acccacggagtctctctc

SEQ ID NO: 485 - DNA, 18 bp, Homo sapiens
taaaggcggtgaagtgag

SEQ ID NO: 486 - DNA, 18 bp, Homo sapiens
ctaccgctctcctaggct

SEQ ID NO: 487 - DNA, 18 bp, Homo sapiens
tggggccagataattctt

SEQ ID NO: 488 - DNA, 18 bp, Homo sapiens
ctggtgtttggtggtgtt

SEQ ID NO: 489 - DNA, 18 bp, Homo sapiens
aaggaagaggtcaccagg

SEQ ID NO: 490 - DNA, 18 bp, Homo sapiens
cacaaattccatttccca

SEQ ID NO: 491 - DNA, 21 bp, Homo sapiens
tcaataggtgatccaacattt

SEQ ID NO: 492 - DNA, 18 bp, Homo sapiens
aaagtcccacaaagggtc

SEQ ID NO: 493 - DNA, 18 bp, Homo sapiens
gggtagggggatcttttt

SEQ ID NO: 494 - DNA, 18 bp, Homo sapiens
tgtggaacattcattggc

SEQ ID NO: 495 - DNA, 18 bp, Homo sapiens
gtcctgggaaagatggaa

SEQ ID NO: 496 - DNA, 18 bp, Homo sapiens
tcaaagcgtctcccataa

SEQ ID NO: 497 - DNA, 18 bp, Homo sapiens
tctttcgctgtacttggc

SEQ ID NO: 498 - DNA, 18 bp, Homo sapiens
tgggaggtcagagtgatg

SEQ ID NO: 499 - DNA, 19 bp, Homo sapiens
ggacagtgtatgtgttggg

SEQ ID NO: 500 - DNA, 18 bp, Homo sapiens
aggcagctgtttttgtga

SEQ ID NO: 501 - DNA, 18 bp, Homo sapiens
cttcttgagtcccgtgtg

SEQ ID NO: 502 - DNA, 19 bp, Homo sapiens
caaccgagaatcctctagc

SEQ ID NO: 503 - DNA, 18 bp, Homo sapiens
gctgggagagaatcacaa

SEQ ID NO: 504 - DNA, 18 bp, Homo sapiens
gctttgcagaagagacca

SEQ ID NO: 505 - DNA, 18 bp, Homo sapiens
acgctgtcaggtcacact

SEQ ID NO: 506 - DNA, 18 bp, Homo sapiens
ggaggatgctcaggtgat

SEQ ID NO: 507 - DNA, 18 bp, Homo sapiens
tagggggatctttttcca

SEQ ID NO: 508 - DNA, 18 bp, Homo sapiens
gagcaatttgaaaagcca

SEQ ID NO: 509 - DNA, 18 bp, Homo sapiens
atggtccagctcctctgt

SEQ ID NO: 510 - DNA, 18 bp, Homo sapiens
atagagcaccccatctcc

SEQ ID NO: 511 - DNA, 18 bp, Homo sapiens
aacattgctgttagccca

SEQ ID NO: 512 - DNA, 18 bp, Homo sapiens
gcaatcgaaacagcattc

SEQ ID NO: 513 - DNA, 18 bp, Homo sapiens
atgagttggcagctgaag

SEQ ID NO: 514 - DNA, 18 bp, Homo sapiens
aatgaaggtcttgcctcc

SEQ ID NO: 515 - DNA, 20 bp, Homo sapiens
gaggagaagatccacaagcg

SEQ ID NO: 516 - DNA, 20 bp, Homo sapiens
tctctggggcatactgaacc

SEQ ID NO: 517 - DNA, 18 bp, Homo sapiens
ctgagcttttggcactgt

SEQ ID NO: 518 - DNA, 18 bp, Homo sapiens
ctgctaggtgacagcagg

SEQ ID NO: 519 - DNA, 20 bp, Homo sapiens
tgtatgagtctggagggtgt

SEQ ID NO: 520 - DNA, 18 bp, Homo sapiens
acacctggctgaggaaat

SEQ ID NO: 521 - DNA, 18 bp, Homo sapiens
gcaggggacgtgataata

SEQ ID NO: 522 - DNA, 18 bp, Homo sapiens
ttttgcttcctaccatgc

SEQ ID NO: 523 - DNA, 18 bp, Homo sapiens
aaaattgtgagcacctcc

SEQ ID NO: 524 - DNA, 23 bp, Homo sapiens
tttatatttaaagtggctttgtt

SEQ ID NO: 525 - DNA, 18 bp, Homo sapiens
gtgcaaagcccacagtat

SEQ ID NO: 526 - DNA, 18 bp, Homo sapiens
aggaaaatgcaagagcag

SEQ ID NO: 527 - DNA, 20 bp, Homo sapiens
ccactgaattgcatactttg

SEQ ID NO: 528 - DNA, 18 bp, Homo sapiens
tctgggtccagtctgcta

SEQ ID NO: 529 - DNA, 18 bp, Homo sapiens
agattttggggagtcagg

SEQ ID NO: 530 - DNA, 17 bp, Homo sapiens
gcgctcaagcaattctc

SEQ ID NO: 531 - DNA, 18 bp, Homo sapiens
caagccccaaagtagtca

SEQ ID NO: 532 - DNA, 18 bp, Homo sapiens
gaatcatccaatccacga

SEQ ID NO: 533 - DNA, 18 bp, Homo sapiens
agcctccaggtgactacc

SEQ ID NO: 534 - DNA, 18 bp, Homo sapiens
gaaggacatggtcagcag

SEQ ID NO: 535 - DNA, 18 bp, Homo sapiens
atgctttcagcattttcg

SEQ ID NO: 536 - DNA, 18 bp, Homo sapiens
tgatccgtggtagggtta

SEQ ID NO: 537 - DNA, 18 bp, Homo sapiens
gtcggattggtttcacaa

SEQ ID NO: 538 - DNA, 19 bp, Homo sapiens
ttttatgggaatttcagcc

SEQ ID NO: 539 - DNA, 21 bp, Homo sapiens
tttggaaaagaacagaaatgt

SEQ ID NO: 540 - DNA, 19 bp, Homo sapiens
ggctagtctttcctgaacc

SEQ ID NO: 541 - DNA, 18 bp, Homo sapiens
ccttaatgcccctgattc

SEQ ID NO: 542 - DNA, 18 bp, Homo sapiens
gcgtttacaagctgagga

SEQ ID NO: 543 - DNA, 18 bp, Homo sapiens
tcaagcttgctttctcaa

SEQ ID NO: 544 - DNA, 18 bp, Homo sapiens
gtagcccagcaagtgtct

SEQ ID NO: 545 - DNA, 18 bp, Homo sapiens
cctggctggagataggat

SEQ ID NO: 546 - DNA, 18 bp, Homo sapiens
cttcccctctgcctatgt

SEQ ID NO: 547 - DNA, 18 bp, Homo sapiens
ggcacgtacttcctacca

SEQ ID NO: 548 - DNA, 18 bp, Homo sapiens
ggtgcttcttacaggcaa

SEQ ID NO: 549 - DNA, 16 bp, Homo sapiens
acccaggctggtgtgt

SEQ ID NO: 550 - DNA, 23 bp, Homo sapiens
actgagttaattatcactcccct

SEQ ID NO: 551 - DNA, 18 bp, Homo sapiens
gatgcattttgcttcacc

SEQ ID NO: 552 - DNA, 21 bp, Homo sapiens
tctgcttttagagctgttagc

SEQ ID NO: 553 - DNA, 19 bp, Homo sapiens
tcaagcttcaaagagcaga

SEQ ID NO: 554 - DNA, 18 bp, Homo sapiens
ggagtacatcccaggacc

SEQ ID NO: 555 - DNA, 19 bp, Homo sapiens
tggtgcttttaaatccaga

SEQ ID NO: 556 - DNA, 21 bp, Homo sapiens
ctcccttacttacttgcattg

SEQ ID NO: 557 - DNA, 18 bp, Homo sapiens
tcttctcccagggaatct

SEQ ID NO: 558 - DNA, 18 bp, Homo sapiens
tttatgtcccctgagcac

SEQ ID NO: 559 - DNA, 19 bp, Homo sapiens
tccctggctatcttgaatc

SEQ ID NO: 560 - DNA, 16 bp, Homo sapiens
cttgactgggtccacg

SEQ ID NO: 561 - DNA, 20 bp, Homo sapiens
cgagacgccagtagatacca

SEQ ID NO: 562 - DNA, 20 bp, Homo sapiens
catcctccatgcctttcagt

SEQ ID NO: 563 - DNA, 20 bp, Homo sapiens
agttccagagaacgagacgc

SEQ ID NO: 564 - DNA, 20 bp, Homo sapiens
cttgtcatcctccatgcctt

SEQ ID NO: 565 - DNA, 20 bp, Homo sapiens
gagcgtgagaggttgaggag

SEQ ID NO: 566 - DNA, 20 bp, Homo sapiens
aaacaaactccagacgcacc

SEQ ID NO: 567 - DNA, 24 bp, Homo sapiens
ctgaaccactacctgtatgacctg

SEQ ID NO: 568 - DNA, 25 bp, Homo sapiens
ctaactacttactcctacagggccc

SEQ ID NO: 569 - DNA, 23 bp, Homo sapiens
gaagcatttcaatactttaactg

SEQ ID NO: 570 - DNA, 20 bp, Homo sapiens
ccactccagtgcacccaatc

SEQ ID NO: 571 - DNA, 20 bp, Homo sapiens
cttctcctggccactctgac

SEQ ID NO: 572 - DNA, 21 bp, Homo sapiens
ggtttacctttgaatcccagc

SEQ ID NO: 573 - DNA, 22 bp, Homo sapiens
tgaggatgaatgagcacatagg

SEQ ID NO: 574 - DNA, 21 bp, Homo sapiens
tttgtggtccattgagtaggc

SEQ ID NO: 575 - DNA, 20 bp, Homo sapiens
aggggaaggaatgtgcttgg

SEQ ID NO: 576 - DNA, 20 bp, Homo sapiens
ttcggctgagcgggcagtgt

SEQ ID NO: 577 - DNA, 26 bp, Homo sapiens
attgaaggtcctccaaaagaatgctg

SEQ ID NO: 578 - DNA, 30 bp, Homo sapiens
agaacgtcaacatatctttttgggggacac

SEQ ID NO: 579 - DNA, 22 bp, Homo sapiens
ttgtatttgaggactttgctcg

SEQ ID NO: 580 - DNA, 20 bp, Homo sapiens
cggtaccatcctcctcttcc

SEQ ID NO: 581 - DNA, 20 bp, Homo sapiens
tttttgcctcatctatgccc

SEQ ID NO: 582 - DNA, 20 bp, Homo sapiens
gggtgacagagcaagactcc

SEQ ID NO: 583 - DNA, 18 bp, Homo sapiens
ttgctcaagttctcctgg

SEQ ID NO: 584 - DNA, 18 bp, Homo sapiens
accttgttttgaggggag

SEQ ID NO: 585 - DNA, 18 bp, Homo sapiens
cttggctatttggacagc

SEQ ID NO: 586 - DNA, 18 bp, Homo sapiens
gggcatttactcacttgc

SEQ ID NO: 587 - DNA, 19 bp, Homo sapiens
cttgtgtcagttgtcaggg

SEQ ID NO: 588 - DNA, 19 bp, Homo sapiens
tggaattgttgtgtcttgg

SEQ ID NO: 589 - DNA, 18 bp, Homo sapiens
ccagttccactggatgtt

SEQ ID NO: 590 - DNA, 18 bp, Homo sapiens
atgggctgtgtttctcaa

SEQ ID NO: 591 - DNA, 18 bp, Homo sapiens
ctgcctatccctggactt

SEQ ID NO: 592 - DNA, 18 bp, Homo sapiens
agtttgtccctagtgccc

SEQ ID NO: 593 - DNA, 19 bp, Homo sapiens
caacacgtctgacatccat

SEQ ID NO: 594 - DNA, 16 bp, Homo sapiens
ggatagtgcacaccca

SEQ ID NO: 595 - DNA, 22 bp, Homo sapiens
tgggtggtactattgttcccat

SEQ ID NO: 596 - DNA, 20 bp, Homo sapiens
agttccagcccccttaccag

SEQ ID NO: 597 - DNA, 20 bp, Homo sapiens
ggccactatcatccctgtgt

SEQ ID NO: 598 - DNA, 20 bp, Homo sapiens
tttcacatgggaagaacacg

SEQ ID NO: 599 - DNA, 20 bp, Homo sapiens
acagtgacactagggacggg

SEQ ID NO: 600 - DNA, 20 bp, Homo sapiens
tgccaggatggagataacaa

SEQ ID NO: 601 - DNA, 20 bp, Homo sapiens
cctgtggcacacatatcacc

SEQ ID NO: 602 - DNA, 20 bp, Homo sapiens
acaaccaagaatggagccac

SEQ ID NO: 603 - DNA, 20 bp, Homo sapiens
tgctgtgtaacaagtcccca

SEQ ID NO: 604 - DNA, 20 bp, Homo sapiens
tgaacggaggacctaccaag

SEQ ID NO: 605 - DNA, 20 bp, Homo sapiens
gcagggtccgactcactaag

SEQ ID NO: 606 - DNA, 20 bp, Homo sapiens
gctgtgagttccctttacgc

SEQ ID NO: 607 - DNA, 20 bp, Homo sapiens
acagtggggacaaagacagg

SEQ ID NO: 608 - DNA, 20 bp, Homo sapiens
tacagggcacctcccagtag

SEQ ID NO: 609 - DNA, 21 bp, Homo sapiens
tcttctgttaaggtttccccc

SEQ ID NO: 610 - DNA, 20 bp, Homo sapiens
tgtctcaaacctccctctgc

SEQ ID NO: 611 - DNA, 20 bp, Homo sapiens
aacatatttcctccccagcc

SEQ ID NO: 612 - DNA, 19 bp, Homo sapiens
cagtcccagccaatgagaa

SEQ ID NO: 613 - DNA, 20 bp, Homo sapiens
ctcctctgcatgggagaatc

SEQ ID NO: 614 - DNA, 20 bp, Homo sapiens
agacctgggaccagtctgtg

SEQ ID NO: 615 - DNA, 20 bp, Homo sapiens
gggagacgacgtcacaagat

SEQ ID NO: 616 - DNA, 20 bp, Homo sapiens
tgatgttgggaagatggtga

SEQ ID NO: 617 - DNA, 20 bp, Homo sapiens
caggcatcttctatgtgcca

SEQ ID NO: 618 - DNA, 20 bp, Homo sapiens
gggaggcacaagttctttca

SEQ ID NO: 619 - DNA, 20 bp, Homo sapiens
acttcgtggcactgagtgtg

SEQ ID NO: 620 - DNA, 20 bp, Homo sapiens
cctttcttacggatgaggca

SEQ ID NO: 621 - DNA, 20 bp, Homo sapiens
ggctgctgagctcttctgat

SEQ ID NO: 622 - DNA, 20 bp, Homo sapiens
tgggtctctctgcctgactt

SEQ ID NO: 623 - DNA, 20 bp, Homo sapiens
tcacctacttccagcttccg

SEQ ID NO: 624 - DNA, 20 bp, Homo sapiens
agacctgggaccagtctgtg

SEQ ID NO: 625 - DNA, 20 bp, Homo sapiens
ctcctctgcatgggagaatc

SEQ ID NO: 626 - DNA, 20 bp, Homo sapiens
aattcaggagacctgggacc

SEQ ID NO: 627 - DNA, 15 bp, Artificial Sequence
  Artificial Sequence is a BstXI-linker adapter.
gtcttcaccacgggg

SEQ ID NO: 628 - DNA, 11 bp, Artificial Sequence
  Artificial Sequence is a BstXI-linker adapter.
gtggtgaagac

SEQ ID NO: 629 - DNA, 18 bp, Artificial Sequence
  Artificial Sequence is a primer.
ccaagttctgagaagtcc

SEQ ID NO: 630 - DNA, 17 bp, Artificial Sequence
  Artificial Sequence is a primer.
aatacctgaaaccatac

SEQ ID NO: 631 - DNA, 17 bp, Artificial Sequence
  Artificial Sequence is an allele specific oligonucleotide.
agactggggtgagacgc

SEQ ID NO: 632 - DNA, 19 bp, Artificial Sequence
  Artificial Sequence is an allele specific oligonucleotide.
cagactgggttgagacgcc

SEQ ID NO: 633 - DNA, 24 bp, Artificial Sequence
  Artificial Sequence is a primer.
cccgtgtgctccgccgcccagttc

SEQ ID NO: 634 - DNA, 25 bp, Artificial Sequence
  Artificial Sequence is a primer.
ggctcacggagctcatcatggactt

SEQ ID NO: 635 - DNA, 502 bp, Artificial Sequence
  Artificial Sequence is a primer.
cccgtgtgctccgccgcccagttcccctgcgcgcggggtcagtgtgtggacctgcgcctgcgctgcgacggcgaggcagactgtcaggaccgctcagacgaggtggactgtgacgccatctgcctgcccaaccagttccggtgtgcgagcggccagtgtgtcctcatcaaacagcagtgcgactccttccccgactgtatcgacggctccgacgagctcatgtgtgaaatcaccaagccgccctcagacgacagcccggcccacagcagtgccatcgggcccgtcattggcatcatcctctctctcttcgtcatgggtggtgtctattttgtgtgccagcgcgtggtgtgccagcgctatgcgggggccaacgggcccttcccgcacgagtatgtcagcgggaccccgcacgtgcccctcaatttcatagccccgggcggttcccagcatggccccttcacaggcatcgcatgcggaaagtccatgatgagctccgtgagcc

SEQ ID NO: 636 - DNA, 21 bp, Artificial Sequence
  Artificial Sequence is a primer.
agcgaggccaccatccacagg

SEQ ID NO: 637 - DNA, 21 bp, Artificial Sequence
  Artificial Sequence is a primer.
tcgctggtcggcataatcaat

SEQ ID NO: 638 - DNA, 501 bp, Artificial Sequence
  Artificial Sequence is a primer.
agcagagccaccatccacaggatctccctggagactaacaacaacgatgtggctatcccactcacgggtgtcaaagaggcctctgcactggactttgatgtgtccaacaatcacatctactggactgatgttagcctcaagacgatcagccgagccttcatgaatgggagctcagtggagcacgtgattgagtttggcctcgactaccctgaaggaatggctgtggactggatgggcaagaacctctattgggcggacacagggaccaacaggattgaggtggcccggctggatgggcagttccggcaggtgcttgtgtggagagaccttgacaaccccaggtctctggctctggatcctactaaaggctacatctactggactgagtggggtggcaagccaaggattgtgcgggccttcatggatgggaccaattgtatgacactggtagacaaggtgggccgggccaacgacctcaccattgattatgccgaccagcga

SEQ ID NO: 639 - RNA, 26 nt, Artificial Sequence
  Artificial Sequence is a Zmax1 oligonucleotide.
raguacagcuucuugccaacccaguc

SEQ ID NO: 640 - RNA, 26 nt, Artificial Sequence
  Artificial Sequence is a Zmax1 oligonucleotide.
ruccuccaggucgauggucagcccau

SEQ ID NO: 641 - RNA, 26 nt, Artificial Sequence
  Artificial Sequence is a Zmax1 oligonucleotide.
rgucugaguccgaguucaaauccagg

SEQ ID NO: 642 - DNA, 3081 bp, Homo sapiens
cccgccagcccagcccagcccaaccctactccctccccacgccagggcagcagccgttgctcagagagaaggtggaggaagaaatccagaccctagcacgcgcgcaccatcatggaccattatgattctcagcaaaccaacgattacatgcagccagaagaggactgggaccgggacctgctcctggacccggcctgggagaagcagcagagaaagacattcacggcatggtgtaactcccacctccggaaggcggggacacagatcgagaacatcgaagaggacttccgggatggcctgaagctcatgctgctgctggaggtcatctcaggtgaacgcttggccaagccagagcgaggcaagatgagagtgcacaagatctccaacgtcaacaaggccctggatttcatagccagcaaaggcgtcaaactggtgtccatcggagccgaagaaatcgtggatgggaatgtgaagatgaccctgggcatgatctggaccatcatcctgcgctttgccatccaggacatctccgtggaagagacttcagccaaggaagggctgctcctgtggtgtcagagaaagacagccccttacaaaaatgtcaacatccagaacttccacataagctggaaggatggcctcggcttctgtgctttgatccaccgacaccggcccgagctgattgactacgggaagctgcggaaggatgatccactcacaaatctgaatacggcttttgacgtggcagagaagtacctggacatccccaagatgctggatgccgaagacatcgttggaactgcccgaccggatgagaaagccatcatgacttacgtgtctagcttctaccacgccttctctggagcccagaaggcggagacagcagccaatcgcatctgcaaggtgttggccgtcaaccaggagaacgagcagcttatggaagactacgagaagctggccagtgatctgttggagtggatccgccgcacaatcccgtggctggagaaccgggtgcccgagaacaccatgcatgccatgcaacagaagctggaggacttccgggactaccggcgcctgcacaagccgcccaaggtgcaggagaagtgccagctggagatcaacttcaacacgctgcagaccaagctgcggctcagcaaccggcctgccttcatgccctctgagggcaggatggtctcggacatcaacaatgcctggggctgcctggagcaggtggagaagggctatgaggagtggttgctgaatgagatccggaggctggagcgactggaccacctggcagagaagttccggcagaaggcctccatccacgaggcctggactgacggcaaagaggccatgctgcgacagaaggactatgagaccgccaccctctcggagatcaaggccttgctcaagaagcatgaggccttcgagagtgacctggctgcccaccaggaccgtgtggagcagattgccgccatcgcacaggagctcaatgagctggactattatgactcacccagtgtcaacgcccgttgccaaaagatctgtgaccagtgggacaatctgggggccctaactcagaagcgaagggaagctctggagcggaccgagaaactgctggagaccattgaccagctgtacttggagtatgccaagcgggctgcacccttcaacaactggatggagggggccatggaggacctgcaggacaccttcattgtgcacaccattgaggagatccagggactgaccacagcccatgagcagttcaaggccaccctccctgatgccgacaaggagcgcctggccatcctgggcatccacaatgaggtgtccaagattgtccagacctaccacgtcaatatggcgggcaccaacccctacacaaccatcacgcctcaggagatcaatggcaaatgggaccacgtgcggcagctggtgcctcggagggaccaagctctgacggaggagcatgcccgacagcagcacaatgagaggctacgcaagcagtttggagcccaggccaatgtcatcgggccctggatccagaccaagatggaggagatcgggaggatctccattgagatgcatgggaccctggaggaccagctcagccacctgcggcagtatgagaagagcatcgtcaactacaagccaaagattgatcagctggagggcgaccaccagctcatccaggaggcgctcatcttcgacaacaagcacaccaactacaccatggagcacatccgtgtgggctgggagcagctgctcaccaccatcgccaggaccatcaatgaggtagagaaccagatcctgacccgggatgccaagggcatcagccaggagcagatgaatgagttccgggcctccttcaaccactttgaccgggatcactccggcacactgggtcccgaggagttcaaagcctgcctcatcagcttgggttatgatattggcaacgacccccagggagaagcagaatttgcccgcatcatgagcattgtggaccccaaccgcctgggggtagtgacattccaggccttcattgacttcatgtcccgcgagacagccgacacagatacagcagaccaagtcatggcttccttcaagatcctggctggggacaagaactacattaccatggacgagctgcgccgcgagctgccacccgaccaggctgagtactgcatcgcgcggatggccccctacaccggccccgactccgtgccaggtgctctggactacatgtccttctccacggcgctgtacggcgagagtgacctctaatccaccccgcccggccgccctcgtcttgtgcgccgtgcccacagatgtgaaatgaatgtaatctaatagaagcctaatcagcccaccatgttctccactgaaaaatcctctttctttggggtttttctttctttcttttttgattttgcactggacggtgacgtcagcctgtacaggctcccaggggtggcgtcaaatgctattgaaattgcgctgaatcgtatgctttttccttttgataaataaacaatgtaaaaatgtttcaaaaacctaataaaataaataaatacg

SEQ ID NO: 643 - DNA, 1324 bp, Homo sapiens
  misc_feature 23, 42: n = A,T,C or G
ggccgcccggcgcccccagcagnccgagccggggcgcacagncggggcgcagcccgcgccccccgccgcgattgacatgatgtttccacaaagcaggcattcgggctcctcgcacctaccccagcaactcaaattcaccacctcggactcctgcgaccgcatcaaagacgaatttcagctactgcaagctcagtaccacagcctcaagctcgaatgtgacaagttggccagtgagaagtcagagatgcagcgtcactatgtgatgtactacgagatgtcctacggcttgaacatcgagatgcacaaacaggctgagatcgtcaaaaggctgaacgggatttgtgcccaggtcctgccctacctctcccaagagcaccagcagcaggtcttgggagccattgagagggccaagcaggtcaccgctcccgagctgaactctatcatccgacagcagctccaagcccaccagctgtcccagctgcaggccctggccctgcccttgaccccactacccgtggggctgcagccgccttcgctgccggcggtcagcgcaggcaccggcctcctctcgctgtccgcgctgggttcccaggcccacctctccaaggaagacaagaacgggcacgatggtgacacccaccaggaggatgatggcgagaagtcggattagcagggggccgggacagggaggttgggaggggggacagaggggagacagaggcacggagagaaaggaatgtttagcacaagacacagcggagctcgggattggctaatctcccatagtatttatggtggcgccggcggggccccagcccagcttgcaggccacctctagctttcttcctaccccattccggcttccctcctcctcccctgcagcctggttaggtggatacctgccctgacatgtgaggcaagctaaggcctggagggtcagatgggagaccaggtcccaagggagcaagacctgcgaagcgcagcagccccggcccttcccccgttttgaacatgtgtaaccgacagtctgccctgggccacagccctctcaccctggtactgcatgcacgcaatgctagctgcccctttcccgtcctgggcaccccgagtctcccccgaccccgggtcccaggtatgctcccacctccacctgccccactcaccacctctgctagttccagacacctccacgcccacctggtcctctcccatcgcccacaaaagggggggcacgagggacgagcttagctgagctgggaggagcagggtgagggtgggcgacccaggattccccctccccttcccaaataaagatgagggtact

SEQ ID NO: 644 - DNA, 2377 bp, Homo sapiens
ggtgacaaagagccaacagagacaataggagacttgtcaatttgtcttgatgggctacagttagagtctgaagttgttaccaatggtgaaactacatgttcagaaagtgcttctcagaatgatgatggctccagatccaaggatgaaacaagagtgagcacaaatggatcagatgaccctgaagatgcaggagctggtgaaaataggagagtcagtgggaataattctccatcactctcaaatggtggttttaaaccttctagacctccaagaccttcacgaccaccaccacccaccccacgtagaccagcatctgtcaatggttcaccatctgccacttctgaaagtgatgggtctagtacaggctctctgccgccgacaaatacaaatacaaatacatctgaaggagcaacatctggattaataattcctcttactatatctggaggctcaggccctaggccattaaatcctgtaactcaagctcccttgccacctggttgggagcagagagtggaccagcacgggcgagtttactatgtagatcatgttgagaaaagaacaacatgggatagaccagaacctctacctcctggctgggaacggcgggttgacaacatgggacgtatttattatgttgaccatttcacaagaacaacaacgtggcagaggccaacactggaatccgtccggaactatgaacaatggcagctacagcgtagtcagcttcaaggagcaatgcagcagtttaaccagagattcatttatgggaatcaagatttatttgctacatcacaaagtaaagaatttgatcctcttggtccattgccacctggatgggagaagagaacagacagcaatggcagagtatatttcgtcaaccacaacacacgaattacacaatgggaagaccccagaagtcaaggtcaattaaatgaaaagcccttacctgaaggttgggaaatgagattcacagtggatggaattccatattttgtggaccacaatagaagaactaccacctatatagatccccgcacaggaaaatctgccctagacaatggacctcagatagcctatgttcgggacttcaaagcaaaggttcagtatttccggttctggtgtcagcaactggccatgccacagcacataaagattacagtgacaagaaaaacattgtttgaggattcctttcaacagataatgagcttcagtccccaagatctgcgaagacgtttgtgggtgatttttccaggagaagaaggtttagattatggaggtgtagcaagagaatggttctttcttttgtcacatgaagtgttgaacccaatgtattgcctgtttgaatatgcagggaaggataactactgcttgcagataaaccccgcttcttacatcaatccagatcacctgaaatattttcgttttattggcagatttattgccatggctctgttccatgggaaattcatagacacgggtttttctttaccattctataagcgtatcttgaacaaaccagttggactcaaggatttagaatctattgatccagaattttacaattctctcatctgggttaaggaaaacaatattgaggaatgtgatttggaaatgtacttctccgttgacaaagaaattctaggtgaaattaagagtcatgatctgaaacctaatggtggcaatattcttgtaacagaagaaaataaagaggaatacatcagaatggtagctgagtggaggttgtctcgaggtgttgaagaacagacacaagctttctttgaaggctttaatgaaattcttccccagcaatatttgcaatactttgatgcaaaggaattagaggtccttttatgtggaatgcaagagattgatttgaatgactggcaaagacatgccatctaccgtcattatgcaaggaccagcaaacaaatcatgtggttttggcagtttgttaaagaaattgataatgagaagagaatgagacttctgcagtttgttactggaacctgccgattgccagtaggaggatttgctgatctcatggggagcaatggaccacagaaattctgcattgaaaaagttgggaaagaaaattggctacccagaagtcatacctgttttaatcgcctggacctgccaccatacaagagctatgagcaactgaaggaaaagctgttgtttgccatagaagaaacagaaggatttggacaagagtaacttctgagaacttgcaccatgaatgggcaagaacttatttgcaatgtttgtccttctctgcctgttgcacatcttgtaaaattggacaatggctctttagagagttatctgagtgtaagtaaattaatgttctcatttaaaaaaaaaaaaaaaaaaa

SEQ ID NO: 645 - DNA, 1295 bp, Homo sapiens
gggccgccgcccacccgggccttgcctctacctcagtcgttgccccccgattttcggctggagcccacggccccggccctcagcccccgctctagcttcgccagtagctcggccagcgacgcgagcaagccgtccagcccccggggcagcctgctgctggacggggcgggggctggcggagctggaggtagccggccctgcagcaatcgcaccagcggcatcagcatgggctacgaccagcgccacgggagccccttgccagcggggccgtgcctgtttggcccacccctggccggagcaccggcaggctattctcccggaggggtcccgtccgcctacccggagctccacgccgccctggaccgattgtacgctcagcggcccgcggggttcggctgccaggaaagccgccactcgtatcccccggccctgggcagccctggagctctagccggggcccgagtgggagcggcggggcccttggagagacggggggcgcaacccggacgacactctgtgaccggctacggggactgcgccgtgggcgcccggtaccaggacgagctaacagctttgcttcgcctgacggtgggcaccggtgggcgagaagccggagcccgcggagaaccctcggggattgagccgtcgggtctggaggagccaccaggtcctttcgttccggaggccgcccgggcccggatgcgggagccagaggccagggaggactacttcggcacctgtatcaagtgcaacaaaggcatctatgggcagagcaatgcctgccaggccctggacagcctctaccacacccagtgctttgtttgctgctcttgtgggcgaactttgcgttgcaaggctttctacagtgtcaatggctctgtgtactgtgaggaagattatctgttttcagggtttcaggaggcagctgagaaatgctgtgtctgtggtcacttgattttggagaagatcctacaagcaatggggaagtcctatcatccaggctgtttccgatgcattgtttgcaacaagtgcctggatggcatccccttcacagtggacttctccaaccaagtatactgtgtcaccgactaccacaaaaattatgctcctaagtgtgcagcctgtggccaacccatcctcccctctgagggctgtgaggacatcgtgagggtgatatccatggaccgggattatcactttgagtgctaccactgtgaggactgccggatgcagctgagtgatgaggaaggctgctgctgtttccctctggatgggcacttgctctgccatggttg

SEQ ID NO: 646 - DNA, 3411 bp, Homo sapiens
gggcccggggtcccgccaccaccgcgcgcgggacagattgattcactttggagctgtaagtactgatgtattagggtgcagcgctcattgttcattgacgcagagtcccaaaatgaatatccaagagcagggtttccccttggacctcggagcaagtttcaccgaagatgctccccgacccccagtgcctggtgaggagggagaactggtgtccacagacccgaggcccgccagctacagtttctgctccgggaaaggtgttggcattaaaggtgagacttcgacggccactccgaggcgctcggatctggacctggggtatgagcctgagggcagtgcctcccccaccccaccatacttgaagtgggctgagtcactgcattccctgctggatgaccaagatgggataagcctgttcaggactttcctgaagcaggagggctgtgccgacttgctggacttctggtttgcctgcactggcttcaggaagctggagccctgtgactcgaacgaggagaagaggctgaagctggcgagagccatctaccgaaagtacattcttgataacaatggcatcgtgtcccggcagaccaagccagccaccaagagcttcataaagggctgcatcatgaagcagctgatcgatcctgccatgtttgaccaggcccagaccgaaatccaggccactatggaggaaaacacctatccctccttccttaagtctgatatttatttggaatatacgaggacaggctcggagagccccaaagtctgtagtgaccagagctctgggtcagggacagggaagggcatatctggatacctgccgaccttaaatgaagatgaggaatggaagtgtgaccaggacatggacgaggacgatggcagagacgctgctccccccggaagactccctcagaagctgctcctggagacagctgccccgagggtctcctccagtagacggtacagcgaaggcagagagttcaggtatggatcctggcgggagccagtcaacccctattatgtcaatgccggctatgccctggccccagccaccagtgccaacgacagcgagcagcagagcctgtccagcgatgcagacaccctgtccctcacggacagcagcgtggatgggatccccccatacaggatccgtaagcagcaccgcagggagatgcaggagagcgcgcaggtcaatgggcgggtgcccctacctcacattccccgcacgtaccgggtgccgaaggaggtccgcgtggagcctcagaagttcgcggaggagctcatccaccgcctggaggctgtgcagcgcacgcgggaggccgaggagaagctggaggagcggctgaagcgcgtgcgcatggaggaggaaggtgaggacggcgatccatcgtcagggcccccagggccgtgtcacaagctgcctcccgcccccgcttggcaccacttcccgccccgcttgtgttggacatgggcttgtgccgggctccgggatgcacacgaggagaaccctgagagcatcctggacgagcacgtacagcgtgtgctgaggacaactggccgccagtcgcctgggcctggccatcgctccccggacagtgggcacgtggccaagatgccagtggcactggggggtgccgcctcggggcacgggaagcacgtacccaagtcaggggcgaagctggacgcggccggcctgcaccaccaccgacacgtccaccaccacgtccaccacagcacagcccggcccaaggagcaggtggaggccgaggccacccgcagggcccagagcagcttcgcctggggcctggaaccacacagccatggggcaaggtcccgaggctactcagagagtgttggcgctgcccccaacgccagtgatggcctcgcccacagtgggaaggtgggcgttgcgtgcaaaagaaatgccaagaaggctgagtcggggaagagcgccagcaccgaggtgccaggtgcctcggaggatgcggagaagaaccagaaaatcatgcagtggatcattgagggggaaaaggagatcagcaggcaccgcaggaccggccacgggtcttcggggacgaggaagccacagccccatgagaactccagaccyttgtcccttgagcacccctgggccggccctcagctccggacctccgtgcagccctcccacctcttcatccaagaccccaccatgccaccccacccagctcccaaccccctaacccagctggaggaggcgcgccgacgtctggaggaggaagaaaagagagccagccgagcaccctccaagcagaggtatgtgcaggaggttatgcggcggggacgcgcctgcgtcaggccagcgtgcgcgccggtgctgcacgtggtaccagccgtgtcggacatggagctctccgagacagagacaagatcgcagaggaaggtgggcggcgggagtgcccagccgtgtgacagcatcgttgtggcgtactacttctgcggggaacccatcccctaccgcaccctggtgaggggccgcgctgtcaccctgggccagttcaaggagctgctgaccaaaaagggcagctacagatactacttcaagaaagtgagcgacgagtttgactgtggggtggtgtttgaggaggttcgagaggacgaggccgtcctgcccgtctttgaggagaagatcatcggcaaagtggagaaggtggactgataggctggtgggctggccgctgtgccaggcgaggcccttggcgggcacgggtgtcacggccaggcagatgacctcgtactcaggagcccgatggggaacagtgttgggtgtaccacccatccctgtggtctacccgtgtctagaggcaggtagggggtccctccaagtggtccacaagcttctgtcctgcccccaaggaggcagcctggaccactcctcatagcaatacttggagggcccagcccaagtgaggcagccgaggtccctgctgccagcttcaggtgacccccccccatcccccggcacctcccttgggcacgtgtgctgggatctactttccctctgggatttgcccacgtacccaggtctggctggggcccaggcccggatgcagaggcctgcagggcctctgtcaattgtacgcgccaccaagtgccttcaacacagcttgtctcttgcctgccactgtgtgaatcggcgacggagcactgcacctgcctccagccgccggctgtgcagtcctgggtcctcctttctgagggcccgtgtaaatatgtacatttctcaggctagggccagcaggggctgcccgagtctgtttttcatgcgatgacacttgtacaattatcttttcaaaggtacttggataataatgaaataaaactgtttttgaacctgaataaaaaaaaaaaaaaaaaaaaaaaaaa

SEQ ID NO: 647 - DNA, 3140 bp, Homo sapiens
ggctgcgagtacctccatggtcccggtggctgtgacggcggcagtggcgcctgtcctgtccataaacagcgatttctcagatttgcgggaaattaaaaagcaactgctgcttattgcgggccttacccgggagcggggcctactacacagtagcaaatggtcggcggagttggctttctctctccctgcattgcctctggccgagctgcaaccgcctccgcctattacagaggaagatgcccaggatatggatgcctataccctggccaaggcctactttgacgttaaagagtatgatcgggcagcacatttcctgcatggctgcaatagcaagaaagcctattttctgtatatgtattccagatatctgtctggagaaaaaaagaaggacgatgaaacagttgatagcttaggccccctggaaaaaggacaagtgaaaaatgaggcgcttagagaattgagagtggagctcagcaaaaaacaccaagctcgagaacttgatggatttggactttatctgtatggtgtggtgcttcgaaaactggacttggttaaagaggccattgatgtgtttgtggaagctactcatgttttgcccttgcattggggagcctggttagaactctgtaacctgatcacagacaaagagatgctgaagttcctgtctttgccagacacctggatgaaagagttttttctggctcatatatacacagagttgcagttgatagaggaggccctgcaaaagtatcagaatctcattgatgtgggcttctctaagagctcgtatattgtttcccaaattgcagttgcctatcacaatatcagagatattgacaaagccctctccatttttaatgagctaaggaaacaagacccttacaggattgaaaatatggacacattctccaaccttctttatgtcaggagcatgaaatcggagttgagttatctggctcataacctctgtgagattgataaataccgtgtagaaacgtgctgtgtaattggcaattattacagtttacgttctcagcatgagaaagcagccttatatttccagagagccctgaaattaaatcctcggtatcttggtgcctggacactaatgggacatgagtacatggagatgaagaacacgtctgctgctatccaggcttatagacatgccattgaggtcaacaaacgggactacagagcttggtatggcctcgggcagacctatgaaatccttaagatgccattttactgcctttattattatagacgggcccaccagcttcgacccaatgattctcgcatgctggttgctttaggagaatgttacgagaaactcaatcaactagtggaagccaaaaagtgttattggagagcttacgccgtgggagatgtggagaaaatggctctggtgaaactggcaaagcttcatgaacagttgactgagtcagaacaggctgcccagtgttacatcaaatatatccaagatatctattcctgtggggaaatagtagaacacttggaggaaagcactgcctttcgctatctggcccagtactattttaagtgcaaactgtgggatgaagcttcaacttgtgcacaaaagtgttgtgcatttaatgatacccgggaagaaggtaaggccttactccggcaaatcctacagcttcggaaccaaggcgagactcctaccaccgaggtgcctgctccctttttcctacctgcttcactctctgctaacaatacccccacacgcagagtttctccactcaacttgtcttctgtcacgccatagttggctactctcaagccagcacattgttagacccatcttaattaagccttacctccatgtaaagaacagcacgtctgttccaaggacctcagctcttcttgtttctacagatggcaacagctccatagggacagcttgtataattaccttcagaggccaactgacagaatcctggcaggaacagacattatcttgccagttagaagtacttctgtctcacttatgtccaaagagtggctatagatcttggccttcttccctgaatgctttttttttttggcccccaagaaagtcccttttatagcactttagcacaggcaatgctacaggaacaaagtttcaatgctgctgagagtgaaagaaaggaggaaagtctgccactctaccctgagctggcagtagggcactgagtacccttaggaagaagtcagagcaatggatacaaatgaccttgctcttggatttgctgagcatgatccctattctgatgtcagagattaggtttaaatggaatagagctatccatttgttcttactctctagggagacaatcttccaaaacagttttgggggggtcttctaaagctttcaaattggaagtaactttattcaactagagttgaataaaagaagggcaaaaataatctcacagagcttggaactgctgatagcccttactgagggcaaaagatggctatattgttagctatactcctaccaaagcaagcaaggagataggattatagataatttcacggacatttggaaataacattggtgattatacagacaagaataaactcacttcaagctggtctgttttaataaattttcaacgtaattgtctatttttttccctcccatctgcaacagaatacatttttttcagcctttatctagatgaggtaaagggaatcattcttatggtgctcttggagagtttcaggcctgtgcatgtgtgtacagcaggaggtaatatgctataatgtctgctgtaatatatttgcacagtagatgctatggatcattctgagctcagggtccagactttattcttattcccagaattttgtgttacgtttttacctcctaacatatgacacttcatcttatattaaggaaggtttagaatatctaatacgacttgaattcatttgttactaagccttctcaggcaagctgtatactagttactggtctccactgccatgccttttcaaggttcccatggtccagaatgatgtttgattcttaatttttctgtcccttttataatttgttttaatgattttgctacatttggaattcaataaaaaatgtgaacaataataaaaaaaaaaaaaaaaaa

SEQ ID NO: 648 - DNA, 3513 bp, Homo sapiens
ccgtgtaccaggtgctgctagtgggaagcacgctgctgaaggaagtgccttccgggctgcagctggagcagttgccttctcagagcctgctgacccacatcccaacggcggggctgcccacttcgctaggaggaggcctgccttactgccaccaggcctggctggatttccgaaggcggctggaagctctactacagaactgccaggcagcttgtgccctgctccagggggccatcgaaagtgtgaaggctgtgccccagcccatggagcctggggaggtcggtcagctgctacagcagacagaggtcctgatgcagcaggtgctagactcgccatggctggcatggctacaatgccaggggggccgggagctgacatggctgaagcaagaggtcccagaggtgaccctgagcccagactacaggacggcaatggacaaggctgacgagctatatgaccgggtggatggattgctgcaccaactgaccctgcagagcaaccagcgaatacaggccctagagttggtccaaacactggaggcccgggaaagcggactgcaccagattgaagtgtggctgcagcaggtgggctggccagcactggaggaggctggggagccctcgctggacatgctgctccaggcccaaggctcttttcaggagctgtaccaggttgcccaggagcaggtcaggcaaggggagaagtttctgcagccgctgactggctgggaggcggctgaactggacccccctggggcacgctttctggccctgcgagcccagctgactgaattctctagggctttggcccagcggtgccagcggctggcggatgctgagaggctgtttcagctcttcagggaggccttgacgtgggctgaggaggggcagcgagtgttggcagagctggagcaggaacgcccgggggttgtgttgcagcagctgcagctgcactggaccaggcaccctgacttgcctcctgcccacttccgaaagatgtgggctctggccacggggctgggctcagaggccatccgccaggagtgccgctgggcctgggcgcggtgccaggacacctggctggccctggaccaaaagcttgaggcttcactgaagctaccaccggtgggcagcacagctagcctgtgtgtcagccaggtccccgctgcacctgcccaccctcccctgaggaaggcctacagcttcgatcggaatctggggcagagtctcagtgaacctgcctgccactgccaccatgcggccactattgctgcctgccgcagaccagaggctggaggaggtgccctgccccaggcatcccctactgtgcctccaccaggcagctctgaccccaggagcctcaacaggctacagctggtgctggcagagatggtggccacggagcgggagtatgtccgggctctagagtacactatggagaactatttccccgagctggatcgccccgatgtgccccagggcctccgcggtcagcgtgcccacctctttggcaacctggagaagctgcgggacttccactgccacttcttcctgcgtgagctggaggcttgcacccggcacccaccacgagtggcctatgccttcctgcgccatagggtgcagtttgggatgtacgcgctctacagcaagaataagcctcgctccgatgccctgatgtcaagctatgggcacaccttcttcaaggacaagcagcaagcactgggggaccacctggacctggcctcctacctgctaaagcccatccagcgcatgggcaagtacgcactgctgctgcaggagctggcacgggcctgcgggggccccacgcaggagctcagtgcgctgcgggaggcccagagccttgtgcacttccagctgcggcacggaaacgacctgctggccatggacgccatccagggctgtgatgttaacctcaaggaacaggggcagctggtgcgacaggatgagtttgtggtgcgcactgggcgccacaagtccgtgcgccgcatcttcctttttgaggagctgctgctcttcagcaagcctcgccatgggcccacaggggttgacacatttgcctacaagcgctccttcaagatggcagaccttggtctcactgagtgctgtgggaacagcaacctgcgcttcgagatctggttccgccgccgcaaggccagggacacctttgtgctgcaggcctccagcctggctatcaagcaggcctggacagctgacatctcccacctgctttggaggcaggccgtccacaacaaggaggtgcgcatggctgagatggtgtccatgggtgtggggaacaaggccttccgagacattgctcccagcgaggaagccatcaacgaccgcaccgtcaactatgtcctgaagtgccgagaagttcgctctcgggcgtccattgccgtagccccgtttgaccatgacagcctctacctgggggcctcgaactcccttcctggagaccctgcctcttgctctgttctggggtccctcaacctgcacctgtacagagacccagctcttctgggtctccgctgtcccctgtatcccagcttcctagaggaagcagcactggaggctgaggcagagctgggcggccagccctctttgactgctgaggactcagagatctcgtcccaatgcccatcagccagtggctccagtggctctgacagcagctgtgtgtcagggcaggccctgggtaggggcctggaggacttaccctgtgtctgagcccgggactggacgagcagtagatccagcagcctgcagctccaaggaacattgcctctctggatctgctgtgaccagggtgtggctgacacctgggctacctccaacctacatgtgcaacgctgttgactaccctttctgatgtgtgtggccattggactaactggcacggggcctctctagggaagtctggttgtagagcctgaataggctcctggccccatgaccccttctcctgtccccagctcccatcccagttgtgggttaagaataggctagagcagacattgggtgtttccatgctgtaggctggtgggggaccatgtgcctctaggcagtgactagggtgcccccacccctcaggaagaacacaggtgggctcctagcagctgatccccaatgcctggccttaaagccgagctcagttaccatagggacaggtccacctctactgggccctcatgcttgcctttcctggcccccaggcccagcccctttttactggggcagtttcgttattttgacttgatgccttttgaataactttcaatagaattgtctaaaattatcttactggttgttaggcctttggtgtctcagagaaggagtctaggtctttgatgtgtgatttaatcttttatttgtttataataaaaaatagactgatttgtaaaaaaaaaaaaaaaaaaaaaaaaaaaaaaaaaaaaaaaaaaaaaaaaaaaaaaaaaaaaaaaaaaaaaaaaaaaaaaaaaaaaaaaaaaaaaaa

SEQ ID NO: 649 - DNA, 3597 bp, Homo sapiens
catgccagttacttcctcaggaaaatattttcttgccttcttctttcagtatggttttaaatttgggaacagtggataacccaagtgtcccacaggccaaggtatattccaatggcagcatgatccctgcacccaaagccagcccctaaagcctaccccttgtgcacccgcagcctggtaagtgagcttggctgcttgtgaggagctacaagtgaaagagaagttattttaaataaatcccaaagtttgaggcagactgtccaggactgttcccaggaagaagcaggagttacccacaggaaaagtctctgacctggtcccctcaggcccagctacctgcgcccaccagcagtgaaggttgatgtactggcccagcatctccacctcccccatgcaaccaggtccctggtaccgtgtctcccgttgcatgtctggcttctgcctgtgctcctcctgccacgagcatcctccctgtccctcctcattccaccgtgtctctcctgcacacatagcctctgtcccagggcgatttatccacttgagtacaggagctgctcagacctctcagcccagccctctgtgactgccccagccccatcctaccccacccaaagctgccttcctggctgtaggagctccctcgtctagccaaggccctatgggtccccatccgaggatccacaagcaatgacttcccaaatgacctccactgcaagaagaatccttaccactgtttccagagccgtgaacgatgctgtgatggcccaggtctcagcaccaccctctgtgacctaaaaagaaaagctcaatttccatctgtcttctttcccaggaccaaggggacacagtaatgtgaagtcaaatacttaaccgagcaaagggccagtgttgttatcagtcaaggacaaacctcccacctcacagacagccaagcagtgagggaaagacagacagacataggtaggaaggtgctctgcaggcacaaggcccagagaagcccctctccgggaacttcccctgctccttccaggaacagtgagcccagtgagcagtcccagccagctcttcaaggccttcaaggggtctttccatgactgagtcacctccaggagctcacctgacccccagagaagacctaccccaggcagctccgtgccctggcttctccccatgccccaaatcccccccagccatccctcctggtcctcgtctacatcaagggcctcttcccctcttcctcccagctctcaggacaggtgactgggagaccttgaaccctcagcctcttcctttaaaaaaaacaaaacaaaacaaaactgtgggccatttatttgggattttggagttgtttggtttttgtttttatatcttaatagttcgaaagtaagaagggagccctgctatggatgttaagtccaaattactcggttagtgggagcaaaacctatgacttccaaggggatgaggagaggttcagaggacaggaggagcctcccccattgaaaaaaaaaaaatgggtcaggacattccctggatgaggacaatgctaggggtggcatctcacatggctgctgctattcctggtgcttccccacacttttgacagatggagtccttctcctaccgcctcctgccacctcaccctacaggcattctctatgtaggaaacaagagccttatcttatagagtggggagctgagacacagcctcaggtaacactgacacagctcccgaatgaggctgggacactctgcaaacctctcctcatggtgctaagggtggcatgctcttgacaggaaacctaaatgaccactcctctcatttggaaagtaatccactgcagtaaaagtttcagacatgcaagagagagtttttttttttttttactacaaatttttgctcccccataaaattatttttttattagagggagtatccaagttttaaaagtatatagaattttttggttgtaagagaaatacatactcattaggatcccgattaaattccttgagtagactggtgcctaccagaaagcaaagcaaagttaaacaaaacgaaacaaaatccttcatatacaaaaagaactttctgtttgtattggcagaggtagtgaggtgattcaggtaggctgaaaatcctgggttgcgggagcctcactttattccattcccacccgctttgatgtctatgcttggctctctgggctgcccctggtactgccgaatcctacacatctcttatcagctttcctcaaactttaaggaggctctgtgagggatgggtcatgggaagacccaagctttccctccgccaggattgcaaaagcaagtagacttggtctatgcagctcttcttccaacaatttctttatttggaattagaacttcctttgttagtatctttgatcttttgactcaagcacattttggaagggctcccttacaaaagtagaatttaaaacagaggatacagttaaagagcaacccaaaggacgcttaagaaaccgagaccacttcaccgaacaggactaaggaacactttcgtgcacagaagtcagccgcaatccaggcacaggacgaagatgggatacacgtgctcatctgtctgtcctcctttcctctccctccccgacgttctagttagcttgttgacttgttaaaccttctgttcttaaaatgaaaagctagcttacctcaaagaatcttgtttccattcggaaaccaacgattttgtgttttagaatggacagccctcccctcaccactccctaccttggcctggtgtccttgagacatacggtctttgcttagtcgtgtgttggctgctttgagcaggaacgaggcctccaggccctgaggtgggaaggaaggattggatgccactgccctcctccccactttagcatgtaggggccagcccatctcttccagcagggtcctgctgagttaccatagcaaccagcaactccagggtaccacaacagacaatggctcagcgagccgacgtgtggggatgatgcaggggttttggcccagccagaggacccagagttgagcttcaaatgctagagaaggggagaaacaggatggaagggtggtttaaggaactggcaggggtctttgagtcacatagagaagccgttgaaggaggtagggcaggttatctctgttccagtcacccccttccagccccatcccacttctgtttcaaactaaagctcccacctcgaacattgaccctttgttagaacaaagcaaagcatatctttaaacaacagtgttaaaatgagcctcaaatgtatgtggatgagatctctaagaagagggtcttctggttttgatttttaaagaagagtatcctagtaaaatattaaaaaaaaattaaaaagtttttaaaaaggaaacctatgctatttaaattggagcccagttgtaacttggtaaaggcaagcttctgtacctttgttataattaattgtatacctgtgtatgtaaatataaggcattcctattttgcagttcagaacaaaaaaaacttatttgtaatatagaataaagtttattaaaaaataagaaaaaaaaaaaaaaaaaaaa

SEQ ID NO: 650 - DNA, 855 bp, Homo sapiens
cgctcaattatctactcgagtctagactcgaggcggccgcccattgtgcactaaagcaggggatagcaacggcgtccctcctccccgctcagctgcagcccgcagtcctcacagtggtaacatgccacgtggtagtctctgtccatggacaccacacggatggttgtctcgcagccctgtgcagggaggataggacgggcacaggaggcgcattttggtgcaaaaaccgtgtgatagtctcgcacgcagtagatgttgttctccacgtccacggtgaagggaaccccgtccaggcactcattgcacacggagcaccggaagcagcctgggtggtaggacttgcccagggcctgcaggatcatttccatgatgagatgtccacacacgctgcatttgtcggccgtctgctggaacccggagtacaggaagtcctcctggcagtacactttctcacccacgttgtagaacgccttcccacggagtcgtctcccacacgagtcgcaggtgaagcagtcagtgtgataaagactccccattgcctggcacgcctgctgggctccgtagatgccaagcccacacttgatgcaaatgccgaagtagtcccgcgccgtgcgcgcctcgagcgcccgctccagctcccgggtgagcgcctccagccgccgctcggccgcgcttgggccgccctcccggccagggggcagcgggagtgcaggcagcgggaagggggccggccccgcaggctccggggagcgagcgggcgcggggcaggcgccgggcgggaggaagtcagcgtaggctttagtgcacaatgggaattcggatccggtcgacactagttctaggatctcttttttt

SEQ ID NO: 651 - DNA, 3791 bp, Homo sapiens
acagacggcgggtgaacatggcgtcctcgacttggtctgagacgtgataggcctgccttctggttgaagatgtggcgagtgaaaaaactgagcctcagcctgtcgccttcgccccagacgggaaaaccatctatgagaactcctctccgtgaacttaccctgcagcccggtgccctcaccacctctggaaaaagatcccccgcttgctcctcgctgaccccatcactgtgcaagctggggctgcaggaaggcagcaacaactcgtctccagtggattttgtaaataacaagaggacagacttatcttcagaacatttcagtcattcctcaaagtggctagaaacttgtcagcatgaatcagatgagcagcctctagatccaattccccaaattagctctactcctaaaacgtctgaggaagcagtagacccactgggcaattatatggttaaaaccatcgtccttgtaccatctccactggggcagcaacaagacatgatatttgaggcccgtttagataccatggcagagacaaacagcatatctttaaatggacctttgagaacagacgatctggtgagagaggaggtggcaccctgcatgggagacaggttttcagaagttgctgctgtatctgagaaacctatctttcaggaatctccgtcccatctcttagaggagtctccaccaaatccctgttctgaacaactacattgctccaaggaaagcctgagcagtagaactgaggctgtgcgtgaggacttagtaccttctgaaagtaacgccttcttgccttcctctgttctctggctttccccttcaactgccttggcagcagatttccgtgtcaatcatgtggacccagaggaggaaattgtagagcatggagctatggaggaaagagaaatgaggtttcccacacatcctaaggagtctgaaacagaagatcaagcacttgtctcaagtgtggaagatattctgtccacatgcctgacaccaaatctagtagaaatggaatcccaagaagctccaggcccagcagtagaagatgttggtaggattcttggctctgatacagagtcttggatgtccccactggcctggctggaaaaaggtgtaaatacctccgtcatgctggaaaatctccgccaaagcttatcccttccctcgatgcttcgggatgctgcaattggcactacccctttctctacttgctcggtggggacttggtttactccttcagcaccacaggaaaagagtacaaacacatcccagacaggcctggttggcaccaagcacagtacttctgagacagagcagctcctgtgtggccggcctccagatctgactgccttgtctcgacatgacttggaagataacctgctgagctctcttgtcattgtggagtttctctcccgccagcttcgggactggaagagccagctggctgtccctcacccagaaacccaggacagtagcacacagactgacacatctcacagtgggataactaataaacttcagcatcttaaggagagccatgagatgggacaggccctacagcaggccagaaatgtcatgcaatcatgggtgcttatctctaaagagctgatatccttgcttcacctatccctgttgcatttagaagaagataagactactgtgaatcaggagtctcggcgtgcagaaacattggtctgttgctgttttgatttgctgaagaaattgagggcaaagctccagagcctcaaagcagaaagggaggaggcaaggcacagagaggaaatggctctcagaggcaaggatgcggcagagatagtgttggaggctttctgtgcacacgccagccagcgcatcagccagctggaacaggacctagcatccatgcgggaattcagaggccttctgaaggatgcccagacccaactggtagggcttcatgccaagcaagaagagctggttcagcagacagtgagtcttacttctaccttgcaacaagactggaggtccatgcaactggattatacaacatggacagctttgctgagtcggtcccgacaactcacagagaaactcacagtcaagagccagcaagccctgcaggaacgtgatgtggcaattgaggaaaagcaggaggtttctagggtgctggaacaagtctctgcccagttagaggagtgcaaaggccaaacagaacaactggagttggaaaacattcgtctagcaacagatctccgggctcagttgcagattctggccaacatggacagccagctaaaagagctacagagtcagcatacccattgtgcccaggacctggctatgaaggatgagttactctgccagcttacccagagcaatgaggagcaggctgctcaatgcgtaaaggaagagatggcactaaaacacatgcaggcagaactgcagcagcaacaagctgtcctggccaaagaggtgcgggacctgaaagagaccttggagtttgcagaccaggagaatcaggttgctcacctggagctgggtcaggttgagtgtcaattgaaaaccacactggaagtgctccgggagcgcagcttgcagtgtgagaacctcaaggacactgtagagaacctaacggctaaactggccagcaccatagcagataaccaggagcaagatctggagaaaacacggcagtactctcaaaagctagggctgctgactgagcaactacagagcctgactctctttctacagacaaaactaaaggagaagactgaacaagagacccttctgctgagtacagcctgtcctcccacccaggaacaccctctgcctaatgacaggaccttcctgggaagcatcttgacagcagtggcagatgaagagccagaatcaactcctgtgcccttgcttggaagtgacaagagtgctttcacccgagtagcatcaatggtttcccttcagcccgcagagaccccaggcatggaggagagcctggcagaaatgagtattatgactactgagcttcagagtctttgttccctgctacaagagtctaaagaagaagccatcaggactctgcagcgaaaaatttgtgagctgcaagctaggctgcaggcccaggaagaacagcatcaggaagtccagaaggcaaaagaagcagacatagagaagctgaaccaggccttgtgcttgcgctacaagaatgaaaaggagctccaggaagtgatacagcagaatgagaagatcctagaacagatagacaagagtggcgagctcataagccttagagaggaggtgacccaccttacccgctcacttcggcgtgcggagacagagaccaaagtgctccaggaggcctggcaggccagctggactccaactgccagcctatggccaccaattggatccaggagaaagtgtggctctctcaggaggtggacaaactgagagtgatgttcctggagatgaaaaatgagaaggaaaactcctgatcaagttccagagcccatagaaatatcctagaggagaaccttcggcgctctgacaaggagttagaaaaactagatgacattgttcagcatatttataagaccctgctctctattccagaggtggtgaggggatgcaaagaactacagggattgctggaatttctgagctaagaaactgaaagccagaatttgtttcacctctttttacctgcaatacccccttaccccaataccaagaccaactggcatagagccaactgagataaatgctatttaaataaagtgtatttaatgaaaaaaaaaaaaaaaaaaaaa

SEQ ID NO: 652 - DNA, 1683 bp, Homo sapiens
ctctgagtgtccagtggtcagttgccccaggatggggaccacagccagagcagccttggtcttgacctatttggctgttgcttctgctgcctctgagggaggcttcacggctacaggacagaggcagctgaggccagagcactttcaagaagttggctacgcagctcccccctccccacccctatcccgaagcctccccatggatcaccctgactcctctcagcatggccctccctttgagggacagagtcaagtgcagccccctccctctcaggaggccacccctctccaacaggaaaagctgctacctgcccaactccctgctgaaaaggaagtgggtccccctctccctcaggaagctgtccccctccaaaaagagctgccctctctccagcaccccaatgaacagaaggaaggaacgccagctccatttggggaccagagccatccagaacctgagtcctggaatgcagcccagcactgccaacaggaccggtcccaagggggctggggccaccggctggatggcttcccccctgggcggccttctccagacaatctgaaccaaatctgccttcctaaccgtcagcatgtggtatatggtccctggaacctaccacagtccagctactcccacctcactcgccagggtgagaccctcaatttcctggagattggatattcccgctgctgccactgccgcagccacacaaaccgcctagagtgtgccaaacttgtgtgggaggaagcaatgagccgattctgtgaggccgagttctcggtcaagacccgaccccactggtgctgcacgcggcagggggaggctcggttctcctgcttccaggaggaagctccccagccacactaccagctccgggcctgccccagccatcagcctgatatttcctcgggtcttgagctgcctttccctcctggggtgcccacattggacaatatcaagaacatctgccacctgaggcgcttccgctctgtgccacgcaacctgccagctactgaccccctacaaagggagctgctggcactgatccagctggagagggagttccagcgctgctgccgccaggggaacaatcacacctgtacatggaaggcctgggaggatacccttgacaaatactgtgaccgggagtatgctgtgaagacccaccaccacttgtgttgccgccaccctcccagccctactcgggatgagtgctttgcccgtcgggctccttaccccaactatgaccgggacatcttgaccattgacatcagtcgagtcacccccaacctcatgggccacctctgtggaaaccaaagagttctcaccaagcataaacatattcctgggctgatccacaacatgactgcccgctgctgtgacctgccatttccagaacaggcctgctgtgcagaggaggagaaattaaccttcatcaatgatctgtgtggtccccgacgtaacatctggcgagaccctgccctctgctgttacctgagtcctggggatgaacaggtcaactgcttcaacatcaattatctgaggaacgtggctctagtgtctggagacactgagaacgccaagggccagggggagcagggctcaactggaggaacaaatatcagctccacctctgagcccaaggaagaatgagtcaccccagagccctagagggtcagatg

SEQ ID NO: 653 - DNA, 1696 bp, Homo sapiens
cacctaaaagccaaaatgggaaaggaaaagactcatatcaacattgtcgtcattggacacgtagattcgggcaagtccaccactactggccatctgatctataaatgcggtggcatcgacaaaagaaccattgaaaaatttgagaaggaggctgctgagatgggaaagggctccttcaagtatgcctgggtcttggataaactgaaagctgagcgtgaacgtggtatcaccattgatatctccttgtggaaatttgagaccagcaagtactatgtgactatcattgatgccccaggacacagagactttatcaaaaacatgattacagggacatctcaggctgactgtgctgtcctgattgttgctgctggtgttggtgaatttgaagctggtatctccaagaatgggcagacccgagagcatgcccttctggcttacacactgggtgtgaaacaactaattgtcggtgttaacaaaatggattccactgagccaccctacagccagaagagatatgaggaaattgttaaggaagtcagcacttacattaagaaaattggctacaaccccgacacagtagcatttgtgccaatttctggttggaatggtgacaacatgctggagccaagtgctaacatgccttggttcaagggatggaaagtcacccgtaaggatggcaatgccagtggaaccacgctgcttgaggctgtggactgcatcctaccaccaactcgtccaactgacaagcccttgcgcctgcctctccaggatgtctacaaaattggtggtattggtactgttcctgttggccgagtggagactggtgttctcaaacccggtatggtggtcacctttgctccagtcaacgttacaacggaagtaaaatctgtcgaaatgcaccatgaagctttgagtgaagctcttcctggggacaatgtgggcttcaatgtcaagaatgtgtctgtcaaggatgttcgtcgtggcaacgttgctggtgacagcaaaaatgacccaccaatggaagcagctggcttcactgctcaggtgattatcctgaaccatccaggccaaataagcgccggctatgcccctgtattggattgccacacggctcacattgcatgcaagtttgctgagctgaaggaaaagattgatcgccgttctggtaaaaagctggaagatggccctaaattcttgaagtctggtgatgctgccattgttgatatggttcctggcaagcccatgtgtgttgagagcttctcagactatccacctttgggtcgctttgctgttcgtgatatgagacagacagttgcggtgggtgtcatcaaagcagtggacaagaaggctgctggagctggcaaggtcaccaagtctgcccagaaagctcagaaggctaaatgaatattatccctaatacctgccaccccactcttaatcagtggtggaagaacggtctcagaactgtttgtttcaattggccatttaagtttagtagtaaaagactggttaatgataacaatgcatcgtaaaaccttcagaaggaaaggagaatgttttgtggaccactttggttttcttttttgcgtgtggcagttttaagttattagtttttaaaatcagtactttttaatggaaacaacttgaccaaaaatttgtcacagaattttgagacccattaaaaaagttaaatgag

SEQ ID NO: 654 - DNA, 7680 bp, Homo sapiens
gaagagcaagaggcaggctcagcaaatggttcagccccagtccccggtggctgtcagtcaaagcaagcccggttgttatgacaatggaaaacactatcagataaatcaacagtgggagcggacctacctaggtaatgtgttggtttgtacttgttatggaggaagccgaggttttaactgcgaaagtaaacctgaagctgaagagacttgctttgacaagtacactgggaacacttaccgagtgggtgacacttatgagcgtcctaaagactccatgatctgggactgtacctgcatcggggctgggcgagggagaataagctgtaccatcgcaaaccgctgccatgaagggggtcagtcctacaagattggtgacacctggaggagaccacatgagactggtggttacatgttagagtgtgtgtgtcttggtaatggaaaaggagaatggacctgcaagcccatagctgagaagtgttttgatcatgctgctgggacttcctatgtggtcggagaaacgtgggagaagccctaccaaggctggatgatggtagattgtacttgcctgggagaaggcagcggacgcatcacttgcacttctagaaatagatgcaacgatcaggacacaaggacatcctatagaattggagacacctggagcaagaaggataatcgaggaaacctgctccagtgcatctgcacaggcaacggccgaggagagtggaagtgtgagaggcacacctctgtgcagaccacatcgagcggatctggccccttcaccgatgttcgtgcagctgtttaccaaccgcagcctcacccccagcctcctccctatggccactgtgtcacagacagtggtgtggtctactctgtggggatgcagtggttgaagacacaaggaaataagcaaatgctttgcacgtgcctgggcaacggagtcagctgccaagagacagctgtaacccagacttacggtggcaacttaaatggagagccatgtgtcttaccattcacctacaatggcaggacgttctactcctgcaccacggaagggcgacaggacggacatctttggtgcagcacaacttcgaattatgagcaggaccagaaatactctttctgcacagaccacactgttttggttcagactcaaggaggaaattccaatggtgccttgtgccacttccccttcctatacaacaaccacaattacactgattgcacttctgagggcagaagagacaacatgaagtggtgtgggaccacacagaactatgatgccgaccagaagtttgggttctgccccatggctgcccacgaggaaatctgcacaaccaatgaaggggtcatgtaccgcattggagatcagtgggataagcagcatgacatgggtcacatgatgaggtgcacgtgtgttgggaatggtcgtggggaatggacatgcattgcctactcgcaacttcgagatcagtgcattgttgatgacatcacttacaatgtgaacgacacattccacaagcgtcatgaagaggggcacatgctgaactgtacatgcttcggtcagggtcggggcaggtggaagtgtgatcccgtcgaccaatgccaggattcagagactgggacgttttatcaaattggagattcatgggagaagtatgtgcatggtgtcagataccagtgctactgctatggccgtggcattggggagtggcattgccaacctttacagacctatccaagctcaagtggtcctgtcgaagtatttatcactgagactccgagtcagcccaactcccaccccatccagtggaatgcaccacagccatctcacatttccaagtacattctcaggtggagacctaaaaattctgtaggccgttggaaggaagctaccataccaggccacttaaactcctacaccatcaaaggcctgaagcctggtgtggtatacgagggccagctcatcagcatccagcagtacggccaccaagaagtgactcgctttgacttcaccaccaccagcaccagcacacctgtgaccagcaacaccgtgacaggagagacgactcccttttctcctcttgtggccacttctgaatctgtgaccgaaatcacagccagtagctttgtggtctcctgggtctcagcttccgacaccgtgtcgggattccgggtggaatatgagctgagtgaggagggagatgagccacagtacctggatcttccaagcacagccacttctgtgaacatccctgacctgcttcctggccgaaaatacattgtaaatgtctatcagatatctgaggatggggagcagagtttgatcctgtctacttcacaaacaacagcgcctgatgcccctcctgacccgactgtggaccaagttgatgacacctcaattgttgttcgctggagcagaccccaggctcccatcacagggtacagaatagtctattcgccatcagtagaaggtagcagcacagaactcaaccttcctgaaactgcaaactccgtcaccctcagtgacttgcaacctggtgttcagtataacatcactatctatgctgtggaagaaaatcaagaaagtacacctgttgtcattcaacaagaaaccactggcaccccacgctcagatacagtgccctctcccagggacctgcagtttgtggaagtgacagacgtgaaggtcaccatcatgtggacaccgcctgagagtgcagtgaccggctaccgtgtggatgtgatccccgtcaacctgcctggcgagcacgggcagaggctgcccatcagcaggaacacctttgcagaagtcaccgggctgtcccctggggtcacctattacttcaaagtctttgcagtgagccatgggagggagagcaagcctctgactgctcaacagacaaccaaactggatgctcccactaacctccagtttgtcaatgaaactgattctactgtcctggtgagatggactccacctcgggcccagataacaggataccgactgaccgtgggccttacccgaagaggccagcccaggcagtacaatgtgggtccctctgtctccaagtaccccctgaggaatctgcagcctgcatctgagtacaccgtatccctcgtggccataaagggcaaccaagagagccccaaagccactggagtctttaccacactgcagcctgggagctctattccaccttacaacaccgaggtgactgagaccaccatcgtgatcacatggacgcctgctccaagaattggttttaagctgggtgtacgaccaagccagggaggagaggcaccacgagaagtgacttcagactcaggaagcatcgttgtgtccggcttgactccaggagtagaatacgtctacaccatccaagtcctgagagatggacaggaaagagatgcgccaattgtaaacaaagtggtgacaccattgtctccaccaacaaacttgcatctggaggcaaaccctgacactggagtgctcacagtctcctgggagaggagcaccaccccagacattactggttatagaattaccacaacccctacaaacggccagcagggaaattctttggaagaagtggtccatgctgatcagagctcctgcacttttgataacctgagtcccggcctggagtacaatgtcagtgtttacactgtcaaggatgacaaggaaagtgtccctatctctgataccatcatcccagctgttcctcctcccactgacctgcgattcaccaacattggtccagacaccatgcgtgtcacctgggctccacccccatccattgatttaaccaacttcctggtgcgttactcacctgtgaaaaatgaggaagatgttgcagagttgtcaatttctccttcagacaatgcagtggtcttaacaaatctcctgcctggtacagaatatgtagtgagtgtctccagtgtctacgaacaacatgagagcacacctcttagaggaagacagaaaacaggtcttgattccccaactggcattgacttttctgatattactgccaactcttttactgtgcactggattgctcctcgagccaccatcactggctacaggatccgccatcatcccgagcacttcagtgggagacctcgagaagatcgggtgccccactctcggaattccatcaccctcaccaacctcactccaggcacagagtatgtggtcagcatcgttgctcttaatggcagagaggaaagtcccttattgattggccaacaatcaacagtttctgatgttccgagggacctggaagttgttgctgcgacccccaccagcctactgatcagctgggatgctcctgctgtcacagtgagatattacaggatcacttacggagaaacaggaggaaatagccctgtccaggagttcactgtgcctgggagcaagtctacagctaccatcagcggccttaaacctggagttgattataccatcactgtgtatgctgtcactggccgtggagacagccccgcaagcagcaagccaatttccattaattaccgaacagaaattgacaaaccatcccagatgcaagtgaccgatgttcaggacaacagcattagtgtcaagtggctgccttcaagttcccctgttactggttacagagtaaccaccactcccaaaaatggaccaggaccaacaaaaactaaaactgcaggtccagatcaaacagaaatgactattgaaggcttgcagcccacagtggagtatgtggttagtgtctatgctcagaatccaagcggagagagtcagcctctggttcagactgcagtaaccaacattgatcgccctaaaggactggcattcactgatgtggatgtcgattccatcaaaattgcttgggaaagcccacaggggcaagtttccaggtacagggtgacctactcgagccctgaggatggaatccatgagctattccctgcacctgatggtgaagaagacactgcagagctgcaaggcctcagaccgggttctgagtacacagtcagtgtggttgccttgcacgatgatatggagagccagcccctgattggaacccagtccacagctattcctgcaccaactgacctgaagttcactcaggtcacacccacaagcctgagcgcccagtggacaccacccaatgttcagctcactggatatcgagtgcgggtgacccccaaggagaagaccggaccaatgaaagaaatcaaccttgctcctgacagctcatccgtggttgtatcaggacttatggtggccaccaaatatgaagtgagtgtctatgctcttaaggacactttgacaagcagaccagctcagggtgttgtcaccactctggagaatgtcagcccaccaagaagggctcgtgtgacagatgctactgagaccaccatcaccattagctggagaaccaagactgagacgatcactggcttccaagttgatgccgttccagccaatggccagactccaatccagagaaccatcaagccagatgtcagaagctacaccatcacaggtttacaaccaggcactgactacaagatctacctgtacaccttgaatgacaatgctcggagctcccctgtggtcatcgacgcctccactgccattgatgcaccatccaacctgcgtttcctggccaccacacccaattccttgctggtatcatggcagccgccacgtgccaggattaccggctacatcatcaagtatgagaagcctgggtctcctcccagagaagtggtccctcggccccgccctggtgtcacagaggctactattactggcctggaaccgggaaccgaatatacaatttatgtcattgccctgaagaataatcagaagagcgagcccctgattggaaggaaaaagacagacgagcttccccaactggtaacccttccacaccccaatcttcatggaccagagatcttggatgttccttccacagttcaaaagacccctttcgtcacccaccctgggtatgacactggaaatggtattcagcttcctggcacttctggtcagcaacccagtgttgggcaacaaatgatctttgaggaacatggttttaggcggaccacaccgcccacaacggccacccccataaggcataggccaagaccatacccgccgaatgtaggacaagaagctctctctcagacaaccatctcatgggccccattccaggacacttctgagtacatcatttcatgtcatcctgttggcactgatgaagaacccttacagttcagggttcctggaacttctaccagtgccactctgacaggcctcaccagaggtgccacctacaacatcatagtggaggcactgaaagaccagcagaggcataaggttcgggaagaggttgttaccgtgggcaactctgtcaacgaaggcttgaaccaacctacggatgactcgtgctttgacccctacacagtttcccattatgccgttggagatgagtgggaacgaatgtctgaatcaggctttaaactgttgtgccagtgcttaggctttggaagtggtcatttcagatgtgattcatctagatggtgccatgacaatggtgtgaactacaagattggagagaagtgggaccgtcagggagaaaatggccagatgatgagctgcacatgtcttgggaacggaaaaggagaattcaagtgtgaccctcatgaggcaacgtgttacgatgatgggaagacataccacgtaggagaacagtggcagaaggaatatctcggtgccatttgctcctgcacatgctttggaggccagcggggctggcgctgtgacaactgccgcagacctgggggtgaacccagtcccgaaggcactactggccagtcctacaaccagtattctcagagataccatcagagaacaaacactaatgttaattgcccaattgagtgcttcatgcctttagatgtacaggctgacagagaagattcccgagagtaaatcatctttccaatccagaggaacaagcatgtctctctgccaagatccatctaaactggagtgatgttagcagacccagcttagagttcttctttctttcttaagccctttgctctggaggaagttctccagcttcagctcaactcacagcttctccaagcatcaccctgggagtttcctgagggttttctcataaatgagggctgcacattgcctgttctgcttcgaagtattcaataccgctcagtattttaaatgaagtgattctaagatttggtttgggatcaataggaaagcatatgcagccaaccaagatgcaaatgttttgaaatgatatgaccaaaattttaagtaggaaagtcacccaaacacttctgctttcacttaagtgtctggcccgcaatactgtaggaacaagcatgatcttgttactgtgatattttaaatatccacagtactcactttttccaaatgatcctagtaattgcctagaaatatctttctcttacctgttatttatcaatttttcccagtatttttatacggaaaaaattgtattgaaaacacttagtatgcagttgataagaggaatttggtataattatggtgggtgattattttttatactgtatgtgccaaagctttactactgtggaaagacaactgttttaataaaagatttacattccaca

SEQ ID NO: 655 - DNA, 1316 bp, Homo sapiens
tcctaatacgactcactatagggctcgagcggccgcccgggcaggtcgaatgcaggcgacttgcgagctgggagcgatttaaaacgctttggattcccccggcctgggtggggagagcgagctgggtgccccctagattccccgcccccgcacctcatgagccgaccctcggctccatggagcccggcaattatgccaccttggatggagccaaggatatcgaaggcttgctgggagcgggaggggggcggaatctggtcgcccactcccctctgaccagccacccagcggcgcctacgctgatgcctgctgtcaactatgcccccttggatctgccaggctcggcggagccgccaaagcaatgccacccatgccctggggtgccccaggggacgtccccagctcccgtgccttatggttactttggaggcgggtactactcctgccgagtgtcccggagctcgctgaaaccctgtgcccaggcagccaccctggccgcgtaccccgcggagactcccacggccggggaagagtaccccagtcgccccactgagtttgccttctatccgggatatccgggaacctaccacgctatggccagttacctggacgtgtctgtggtgcagactctgggtgctcctggagaaccgcgacatgactccctgttgcctgtggacagttaccagtcttgggctctcgctggtggctggaacagccagatgtgttgccagggagaacagaacccaccaggtcccttttggaaggcagcatttgcagactccagcgggcagcaccctcctgacgcctgcgcctttcgtcgcggccgcaagaaacgcattccgtacagcaaggggcagttgcgggagctggagcgggagtatgcggctaacaagttcatcaccaaggacaagaggcgcaagatctcggcagccaccagcctctcggagcgccagattaccatctggtttcagaaccgccgggtcaaagagaagaaggttctcgccaaggtgaagaacagcgctaccccttaagagatctccttgcctgggtgggaggagcgaaagtgggggtgtcctggggagaccagaaacctgccaagcccaggctggggccaaggactctgctgagaggcccctagagacaacacccttcccaggccactggctgctggactgttcctcaggagcggcctgggtacccagtatgtgcagggagacggaaccccatgtgacaggcccactccaccagggttcccaaagaacctggcccagtcataatcattcatcctcacagtggcaataatcacgataaccagt

SEQ ID NO: 656 - DNA, 566 bp, Homo sapiens
cccaccaaacccataaagagggtgggtcgacccacgcgtccgcggacgcgtgggaaattattgaattggaaacagaaatagaaaagtttaaagctgagaacgcatctttagctaaacttcgcattgaacgagaaagtgccttggaaaaactcaggaaagaaattgcagacttcgaacaacagaaagcaaaagaattagctcgaatagaagagtttaaaaaggaggagatgaggaagctacaaaaggaacgtaaagtttttgaaaagtatactacagctgcaagaacttttccagataaaaaggaacgtgaagaaatacagactttaaaacagcaaatagcagatttacgggaagatttgaaaagaaaggagaccaaatggtcaagtacacacagccgtctcagaagccagatacaaatgttagtcagagagaacacagacctccgggaagaaataaaagtgatggaaagattccgactggatgcctggaagagagcagaagccatagagagcagcctcgaggtggagaagaaggacaagcttgcgaacacatctgttcgatttcaa

SEQ ID NO: 657 - DNA, 5067 bp, Homo sapiens
gcccggacacctgtctgcagcatggataagtatgacgacctgggcctggaggccagtaaattcatcgaggacctgaacatgtatgaggcctctaaggatgggctcttccgagtggacaagggtgcaggcaacaaccccgagtttgaggaaactcgcagggtgttcgccaccaagatggccaaaatccacctccagcagcagcagcagcagctcctgcaggaggagactctgcccagggggagtagaggccctgtcaatggagggggccgcctgggcccacaggcccgttgggaagttgtgggcagcaagctgactgtggatggtgctgccaagcctcctcttgctgcctcgacaggggcacctggggcagtcaccaccctcgctgctgggcagcccccgtacccaccgcaggagcagagatccaggccatacctgcatggcacgaggcatggcagccaggactgtggttccagggagagcctggcgacttctgagatgtctgctttccaccagccaggcccctgtgaggatccttcctgcctcactcatggagactattatgacaacctctccttggcaagcccaaagtggggtgacaaaccaggagtgtcccccagcatcggcctgagtgtagggagtgggtggcctagctccccggggagtgacccaccactgcccaaaccctgcggggaccatcccctaaatcaccgacagctctccctgagctccagcaggtcttctgagggtagcctcggtggtcagaatagtggcattggtggccgcagcagcgagaagccaacaggcctttggtccactgcctcctcccagcgggtgagccctggcctgccttccccaaacttggagaacggagcaccagctgtggggcctgttcagcccaggactccttctgtgtcagcacccttggccctgagctgccccaggcaaggaggtcttccaagatcaaactcggggctggggggtgaggtttcaggtgtgatgtccaaacccaatgtggacccccaaccctggttccaggatgggcccaaatcttacctttccagttctgccccgtcatcctcgccagctggcctggacggttcacagcagggtgcggtccctgggctggggccgaagcctggctgcacagaccttggcactggtcccaagctcagccccaccagtcttgtccatccagtgatgtccaccctgcctgagttatcttgtaaagagggtcccctgggctggtcttctgatggtagcctgggatctgtgctcctggacagccccagctcccctagggtaaggctgccctgccagcccctcgtcccaggtcctgagctgagaccctctgctgctgagttgaaattagaagccctcacccaacgtctggagcgagagatggatgctcacccgaaggctgattactttggagcctgtgtgaaatgcagcaaaggggtgtttggggctggccaggcctgtcaggccatggggaacctctaccatgacacatgcttcacctgtgcagcttgcagccggaagctgagaggaaaagccttttattttgtcaacggcaaagtgttttgtgaagaagacttcctgtactctggtttccagcagtcggctgacaggtgttttctttgtggacatctgatcatggacatgatcctgcaagccctggggaagtcctaccaccccggctgtttccgctgtgtcatctgtaatgagtgtttggatggggtgcccttcaccgtggactcagagaacaagatctactgtgtccgagattaccacaaggtgctggcccccaagtgtgcagcctgtgggcttcccatccttccacctgagggctcagatgagaccatccgtgtcgtgtccatggacagagactaccacgtggagtgttaccactgcgaggactgtggtctggagctcaatgatgaagatggccaccgctgttatccgctggaggaccacctgttctgtcactcctgccacgtgaagaggctggagaagagaccctcatctacagcccttcaccagcaccacttctagccagagccacttgcagacatcacggcaggggatgaggagccggggttgctgctgctgcttccggtggcccctggggtggaagtggggtaggggaagaggaggggcaggagggagagttcctgtgagcatgtggggggtgcctttcctttaaccagggaggtgaacactacctgcctcctgcgtgtattttccaagtgcttttctctgttgccacattttcctcaggttactcaggaaaatgctccagcatgtgcgagcacatgacctgaggttgcatcatagcaccaaaggaatcctcctgtcccctctgggaacatttcatgcttcagagggagaggtttttattgagcttgtttcacaatatccccttgaagggacagctcagctgccaatacattcaaccctttctcttccttcaggaaaatacctatacccaaatgttccctcccccgacatatatcatggcatgacttaaggcttcttttcacctgagagcttcagttcttctgcagaatggctgcaaatttaattgcattaaggcaagaaggaagctctaatgtgtgctttgtatcctaagataaatttgcttagaaaaccagagtcaagatttgaaataggtgaggcagggtttcctccttagacactgacagcattctccgtaccccttcaaatccttactctcctaaaggcagctgagtccgcgacagaaatttgccctatgggagtaaaacatactttgggagaagaacttggtgcaggcaccaggatttttttttttgcccacgtgtttgcgctgtttttctctggagttctcaagagttggtgacttggaaggccgcttctgcaaggcaagtctcaggaacccatgcaggtacatcgcttgcacctgtttttagcttatttaatgacgggcttttgggaagagctgcccgcatactgagagacagcttcttataaacaaggagagtttttgtgtgtgcgagatctctaagccagcgtgggagggagcgcctcaggataagttattatattcatttcgttggtttctctcctgcccaattcttggcacaggcattatgtttgaagaaaccaggataaggtacactgcttttgtctgtttaatttttttagttgtttcccttcactttcagtcttccacacacaaaaaatacctcacagagcttcaccaaatcacagattcaggaggaatttggctttcacactggactcagataccttcttcagtgtgttggaaatcactggcttcacacaggcccaactccaactggtcagggcagagtgatcgtaactaaaggtcagtggggaatagatccgattcagtgcttttgccttatgcatttcagcatcctggctccccagggtggcaggagctgaggaagggccacacactggcaagatttcaagaccactctctgcactgaagaggtaaaatttgcactgcaagtcacatccctgaggccagaggtcagtaccctttggtatttcgattagaagaagctgcaaaagaaaggcagcccattttaccattgccagccaggccggggacacaggagccggtgtgtgcactctgcctcctaacattgcacccagagcaagaggactgggtgctgggctgcagaggccggtcagtggagcccctagcacgtgtgaactcaggcttttcattgggcccggctccacttctaggccatgttttgactcatttggtaaccattgcctgtaagcagcacagaattggtgccatggattatcttttccatgttgatggaattcattctgttggaatcctttggccagatgtcacttcagccagggtgtgcatcatcattggttctttttcacaggctgagcctcctgaaaacccatgaacgctggggctggggaagtgaaccctgaggtggggaccctctcttcccatcaaatcatccagctcagtgtggggcgtggcaggggggtaaatgaagccagccaatgtgttaacctgtctctgtcaacctaagaatgttggccttactgacacacctttgctccatgttcaagaccagaagtagctgggatttgtttgcaaattgggtaattagtttaaaaatctgtgattacatttttaaatgaaattttcaaagtggcctagattgaggtgattcagataggtttgcgaatataccattttatattgttgagaaagaacaaaaagggaatttccagatgtcctagaaatcctagcaacagatttctctggttgtcagtttccctggagaaggcgccagataggaatctccaatcagttgtttttctcttcgcttcaggcccttacacaaaagccatgaagagatgttcacctacccggtattttaaatgttctgtaaattattagccaaatagaactgtaatggggttgtatttatgggcgcctagaaagaaaacacaaggacttggtaggccaggaagaaaagattttaaaatttagaatgaatagcccttctgggttttctttttgacaattcttggacttgaggtaaaacaaggaggattgtggccggatttcagatcccaaagccagcctccatcttaggcctttgcctcattgtgccttttaggttttcttacccaccgtctcctgttttgtcttttttttcttttctcctacccctatcttgggacattcagaaactgcctgggtggtttgagaagagacaacccagtttgatctgcaatacaaggatccattcgtaatctctctctcactgatgttattcccccatctgccgtcttggttcatctcaccacagaagggcatttagtcctacccagccatcggctgcggtatgacagcaggatggcacttcccatttctctgtggttagtgctcgagtgaaaacctctttcagctgagtcctctgaggttctgctgttgagtcctgggtggctgatggaatgattgaggaggtctggtcaccctcaagcgccgtcatcgccttgtttccatgggcttct

SEQ ID NO: 658 - DNA, 950 bp, Homo sapiens
tcgaccggatccgaattcccattgtgcactaaagcgtctccctgctccgcggcccgggctggcgggcgggcgctcggctggcggctgcagcagcagagggagacccgcggcaaccccggcaacccagggctcggcgtcgctgccaccatgacgggaagcaatatgtcggacgccttggccaacgccgtgtgccagcgctgccaggcccgcttctcccccgccgagcgcattgtcaacagcaatggggagctgtaccatgagcactgcttcgtgtgtgcccagtgcttccggcccttccccgaggggctcttctatgagtttgaaggccggaagtactgcgaacacgacttccaaatgctgtttgctccgtgctgtggatcctgcggtgagttcatcattggccgcgtcatcaaggccatgaacaacaactggcacccgggctgcttccgctgcgagctgtgtgatgtggagctggctgacctgggctttgtgaagaatgccggcaggcatctctgccggccttgccacaaccgtgagaaggccaagggcctgggcaagtacatctgccagcggtgccacctggtcatcgacgagcagcccctcatgttcaggagcgacgcctaccaccctgaccacttcaactgcacccactgtgggaaggagctgacagccgaggcccgcgagctgaagggtgagctctactgcctgccctgccatgacaagatgggcgttcccatctgcggggcctgccgccggcccatcgagggccgagtggtcaacgcgctgggcaagcagtggcacgtggagcactttgtctgtgccaagtgtgagaagccattcctggggcaccggcactatgagaagaagggcctggcctactgcgagctttagtgcacaatgggcggccgcctcgagtctagactcgagtagataattgagcggaatttctt

SEQ ID NO: 659 - DNA, 2346 bp, Homo sapiens
ccgccgtcgcccccgcctccccctgcctcagcggctgcccccgccagcgggccgcccgctcccccgggccttgcagcgggccccggcccggctggaggggccccgaccccagctctggtggcgggcagcagcgccgcggcccccttccctcacggggactcggccctgaacgagcaggagaaggagttgcagcggcggctgaagcgtctctacccggccgtggacgaacaagagacgccgctgcctcggtcctggagcccgaaggacaagttcagctacatcggcctctctcagaacaacctgcgggtgcactacaaaggtcatggcaaaaccccaaaagatgccgcgtcagttcgagccacgcatccaataccagcagcctgtgggatttattattttgaagtaaaaattgtcagtaagggaagagatggttacatgggaattggtctttctgctcaaggtgtgaacatgaatagactaccaggttgggataagcattcatatggttaccatggggatgatggacattcgttttgttcttctggaactggacaaccttatggaccaactttcactactggtgatgtcattggctgttgtgttaatcttatcaacaatacctgcttttacaccaagaatggacatagtttaggtattgctttcactgacctaccgccaaatttgtatcctactgtggggcttcaaacaccaggagaagtggtcgatgccaattttgggcaacatcctttcgtgtttgatatagaagactatatgcgggagtggagaaccaaaatccaggcacagatagatcgatttcctatcggagatcgagaaggagaatggcagaccatgatacaaaaaatggtttcatcttatttagtccaccatgggtactgtgccacagcagaggcctttgccagatctacagaccagaccgttctagaagaattagcttccattaagaatagacaaagaattcagaaattggtattagcaggaagaatgggagaagccattgaaacaacacaacagttatacccaagtttacttgaaagaaatcctaatctccttttcacattaaaagtgcgtcagtttatagaaatggtgaatggtacagatagtgaagtacgatgtttgggaggccgaagtccaaagtctcaagacagttatcctgttagtcctcgaccttttagtagtccaagtatgagccccagccatggaatgaatatccacaatttagcatcaggcaaaggaagcaccgcacatttttcaggttttgaaagttgtagtaatggtgtaatatcaaataaagcacatcaatcatattgccatagtaataaacaccagtcatccaacttgaatgtaccagaactaaacagtataaatatgtcaagatcacagcaagttaataacttcaccagtaatgatgtagacatggaaacagatcactactccaatggagttggagaaacttcatccaatggtttcctaaatggtagctctaaacatgaccacgaaatggaagattgtgacaccgaaatggaagttgattcaagtcagttgagacgccagttgtgtggaggaagtcaggccgccatagaaagaatgatccactttggacgagagctgcaagcaatgagtgaacagctaaggagagactgtggcaagaacactgcaaacaaaaaaatgttgaaggatgcattcagtctactagcatattcagatccctggaacagcccagttggaaatcagcttgacccgattcagagagaacctgtgtgctcagctcttaacagtgcaatattagaaacccacaatctgccaaagcaacctccacttgccctagcaatgggacaggccacacaatgtctaggactgatggctcgatcaggaattggatcctgcgcatttgccacagtggaagactacctacattagctatgcatttcaagagctcacacttatattgtggcatatagtcaacatggaagtagaccagctctgctgatttgaaatttagattttttaaattatgtactggggacaggtttttgtcgctttacattgcttcctagtttacagcatgatgcaaatgattttctaacttagtgttaggagaaattattttccatctttaacctcttagttgtctaagagttaaatattactgaatttcagacgttcaaattgatcatcacaaatcctttaaaacaattacctaaaagaaaccaaaaatcctgccttctttgtgggggaggggggagagaggggaaggaaatggaacaagttgtgtttgtgttagcatgtgggtgatgtaaacttcaaattgggagatgttccgacccc

SEQ ID NO: 660 - DNA, 2512 bp, Homo sapiens
caatgcactgacggatatgagtgggatcctgtgagacagcaatgcaaagatattgatgaatgtgacattgtcccagacgcttgtaaaggtggaatgaagtgtgtcaaccactatggaggatacctctgccttccgaaaacagcccagattattgtcaataatgaacagcctcagcaggaaacacaaccagcagaaggaacctcaggggcaaccaccggggttgtagctgccagcagcatggcaaccagtggagtgttgcccgggggtggttttgtggccagtgctgctgcagtcgcaggccctgaaatgcagactggccgaaataactttgtcatccggcggaacccagctgaccctcagcgcattccctccaacccttcccaccgtatccagtgtgcagcaggctacgagcaaagtgaacacaacgtgtgccaagacatagacgagtgcactgcagggacgcacaactgtagagcagaccaagtgtgcatcaatttacggggatcctttgcatgtcagtgccctcctggatatcagaagcgaggggagcagtgcgtagacatagatgaatgtaccatccctccatattgccaccaaagatgcgtgaatacaccaggctcattttattgccagtgcagtcctgggtttcaattggcagcaaacaactatacctgcgtagatataaatgaatgtgatgccagcaatcaatgtgctcagcagtgctacaacattcttggttcattcatctgtcagtgcaatcaaggatatgagctaagcagtgacaggctcaactgtgaagacattgatgaatgcagaacctcaagctacctgtgtcaatatcaatgtgtcaatgaacctgggaaattctcatgtatgtgcccccagggataccaagtggtgagaagtagaacatgtcaagatataaatgagtgtgagaccacaaatgaatgccgggaggatgaaatgtgttggaattatcatggcggcttccgttgttatccacgaaatccttgtcaagatccctacattctaacaccagagaaccgatgtgtttgcccagtctcaaatgccatgtgccgagaactgccccagtcaatagtctacaaatacatgagcatccgatctgataggtctgtgccatcagacatcttccagatacaggccacaactatttatgccaacaccatcaatacttttcggattaaatctggaaatgaaaatggagagttctacctacgacaaacaagtcctgtaagtgcaatgcttgtgctcgtgaagtcattatcaggaccaagagaacatatcgtggacctggagatgctgacagtcagcagtatagggaccttccgcacaagctctgtgttaagattgacaataatagtggggccattttcattttagtcttttctaagagtcaaccacaggcatttaagtcagccaaagaatattgttaccttaaagcactattttatttatagatatatctagtgcatctacatctctatactgtacactcacccataacaaacaattacaccatggtataaagtgggcatttaatatgtaaagattcaaagtttgtctttattactatatgtaaattagacattaatccactaaactggtcttcttcaagagagctaagtatacactatctggtgaaacttggattctttcctataaaagtgggaccaagcaatgatgatcttctgtggtgcttaaggaaacttactagagctccactaacagtctcataaggaggcagccatcataaccattgaatagcatgcaagggtaagaatgagtttttaactgctttgtaagaaaatggaaaaggtcaataaagatatatttctttagaaaatggggatctgccatatttgtgttggtttttattttcatatccagcctaaaggtggttgtttattatatagtaataaatcattgctgtacaacatgctggtttctgtagggtatttttaattttgtcagaaattttagattgtgaatattttgtaaaaaacagtaagcaaaattttccagaattcccaaaatgaaccagataccccctagaaaattatactattgagaaatctatggggaggatatgagaaaataaattccttctaaaccacattggaactgacctgaagaagcaaactcggaaaatataataacatccctgaattcaggcattcacaagatgcagaacaaaatggataaaaggtatttcactggagaagttttaatttctaagtaaaatttaaatcctaacacttcactaatttataactaaaatttctcatcttcgtacttgatgctcacagaggaagaaaatgatgatggtttttattcctggcatccagagtgacagtgaacttaagcaaattaccctcctacccaattctatggaatattttatacgtctccttgtttaaaatctgactgctttactttgatgtatcatatttttaaataaaaataaatattcctttagaagatcactctaaaa

SEQ ID NO: 661 - DNA, 2306 bp, Homo sapiens
gggcgggagctgcacgcgccgtggctccggatctcttcgtctttgcagcgtacgcccgagtcggtcagcgccggaggacctcagcagccatgtcgaagccccatagtgaagccgggactgccttcattcagacccagcagctgcacgcagccatggctgacacattcctggagcacatgtgccgcctggacattgattcaccacccatcacagcccggaacactggcatcatctgtaccattggcccagcttcccgatcagtggagacgttgaaggagatgattaagtctggaatgaatgtggctcgtctgaacttctctcatggaactcatgagtaccatgcggagaccatcaagaatgtgcgcacagccacggaaagctttgcttctgacccctacctctaccggcccgttgctgtggctctagacactaaaggacctgagatccgaactgggctcatcaagggcagcggcactgcagagctggagctgaagaagggagccactctcaaaatcacgctggataacgcctacatggaaaagtgtgacgagaacatcctgtggctggactacaagaacatctgcaaggtggtggaagtgggcagcaagatctacgtggatgatgggcttatttctctccaggtgaagcagaaaggtgccgacttcctggtgacggaggtggaaaatggtggctccttgggcagcaagaagggtgtgaaccttcctggggctgctgtggacttgcctgctgtgtcggagaaggacatccaggatctgaagtttggggtcgagcaggatgttgatatggtgtttgcgtcattcatccgcaaggcatctgatgtccatgaagttaggaaggtcctgggagagaagggaaagaacatcaagattatcagcaaaatcgagaatcatgagggggttcggaggtttgatgaaatcctggaggccagtgatgggatcatggtggctcgtggtgatctaggcattgagattcctgcagagaaggtcttccttgctcagaagatgatgattggacggtgcaaccgagctgggaagcctgtcatctgtgctactcagatgctggagagcatgatcaagaagccccgccccactcgggctgaaggcagtgatgtggccaatgcagtcctggatggagccgactgcatcatgctgtctggagaaacagccaaaggggactatcctctggaggctgtgcgcatgcagcacctgattgcccgtgaggcagaggctgccatctaccacttgcaattatttgaggaactccgccgcctggcgcccattaccagcgaccccacagaagccaccgccgtgggtgccgtggaggcctccttcaagtgctgcagtggggccataatcgtcctcaccaagtctggcaggtctgctcaccaggtggccagataccgcccacgtgcccccatcattgctgtgacccggaatccccagacagctcgtcaggcccacctgtaccgtggcatcttccctgtgctgtgcaaggacccagtccaggaggcctgggctgaggacgtggacctccgggtgaactttgccatgaatgttggcaaggcccgaggcttcttcaagaagggagatgtggtcattgtgctgaccggatggcgccctggctccggcttcaccaacaccatgcgtgttgttcctgtgccgtgatggaccccagagcccctcctccagcccctgtcccacccccttcccccagcccatccattaggccagcaacgcttgtagaactcactctgggctgtaacgtggcactggtaggttgggacaccagggaagaagatcaacgcctcactgaaacatggctgtgtttgcagcctgctctagtgggacagcccagagcctggctgcccatcatgtggccccacccaatcaagggaagaaggaggaatgctggactggaggcccctggagccagatggcaagagggtgacagcttcctttcctgtgtgtactctgtccagttcctttagaaaaaatggatgcccagaggactcccaaccctggcttggggtcaagaaacagccagcaagagttaggggccttagggcactgggctgttgttccattgaagccgactctggccctggcccttacttgcttctctagctctctaggcctctccagtttgcacctgtccccaccctccactcagctgtcctgcagcaaacactccaccctccaccttccattttcccccactactgcagcacctccaggcctgttgctatagagcctacctgtatgtcaataaacaacagctgaagcacc

SEQ ID NO: 662 - DNA, 2656 bp, Homo sapiens
gaattcgcggccgcagagtccccgggccaagatggctgcgcggtgctccacacgctggttgctggtggttgtggggaccccgcggctgccggctatatcgggtagaggggcccggccgcccagggagggcgtggtgggggcatggctgagccgcaagctgagcgtccccgcctttgcgtcttccctgacctcttgcggcccccgagcgctgctgacattgagacctggtgtcagccttacaggaacaaaacataaccctttcatttgtactgcctccttccacacgagtgcccctttggccaaagaagattattatcagatattaggagtgcctcgaaatgccagccagaaagagatcaagaaagcctattatcagcttgccaagaagtatcaccctgacacaaataaggatgatcccaaagccaaggagaagttctcccagctggcagaagcctatgaggttttgagtgatgaggtgaagaggaagcagtacgatgcctacggctctgcaggcttcgatcctggggccagcggctcccagcatagctactggaagggaggccccactgtggaccccgaggagctgttcaggaagatctttggcgagttctcatcctcttcatttggagatttccagaccgtgtttgatcagcctcaggaatacttcatggagttgacattcaatcaagctgcaaagggggtcaacaaggagttcaccgtgaacatcatggacacgtgtgagcgctgcaacggcaaggggaacgagcccggcaccaaggtgcagcattgccactactgtggcggctccggcatggaaaccatcaacacaggcccttttgtgatgcgttccacgtgtaggagatgtggtggccgcggctccatcatcatatcgccctgtgtggtctgcaggggagcaggacaagccaagcagaaaaagcgagtgatgatccctgtgcctgcaggagtcgaggatggccagaccgtgaggatgcctgtgggaaaaagggaaattttcattacgttcagggtgcagaaaagccctgtgttccggagggacggcgcagacatccactccgacctctttatttctatagctcaggctcttcttgggggaacagccagagcccagggcctgtacgagacgatcaacgtgacgatcccccctgggactcagacagaccagaagattcggatgggtgggaaaggcatcccccggattaacagctacggctacggagaccactacatccacatcaagatacgagttccaaagaggctaacgagccggcagcagagcctgatcctgagctacgccgaggacgagacagatgtggaggggacggtgaacggcgtcaccctcaccagctctggtggcagcaccatggatagctccgcaggaagcaaggctaggcgtgaggctggggaggacgaggagggattcctttccaaacttaagaaaatgtttacctcatgatatcccagccgaggaaaaagatccactggaaactaggccgggaagcagcagcccctccaagggccagggcacctgggagacgggaggattccagaacagcagcactgagctcccacccgcagagcctctggacggccttggcaacagcaaaatcatgggacaacacctctctccacggaaaggtcacagtggacagcccgggcagtaggatgcagccccagaggctggtggcagtttcctgtccattggtaggtgacggccccctggtcagcagaggagaggttagatcttgcaggctaaaactctaatttggaattgaatattgtggatatcttagttaaaggccatgcttacagcttagaaatgaagccttaagctgcatcaagttacgaagtgattaatttccttctcagcaaacctccgggaggttccagaatgagttcttcctgacaggttgtcttcactgggagcgtggggcccccaggccccaccagcaccgtcctcccctaatgaggggccctgccgaggcatcagctgctctgctcagttagtttttattcccggggtaccaagcagctgcacagtcggtgcctgggaagcacgttaaaggcccagagagatcctgggggttctgctctgaccgtgtgggtggtgatccttgtcaggatgtacagtccttgctcccaccccatccgggatggccgcctgtccctgactattgagtcctgttgttgtaagccaggcatggagggctcctgcccttctgctgagccacagcccattgcagcactgtgctggccagacttcagctgccttgggaactgaagccctgccactgttgctagtcaggggcttggttctcccacttacactgttgacatctattttctgaagtgtgtttaaattattcagtgctaatcattgttttttcctttgtaaatgttgattcagaaaaggaaagcacaggctaagcagttgaaggttccccaccattcagtgagagcagaacccccattccccagcctctgctggtagcatgtcgcagtttccatgtgtttcaggatcttcgggctgtcgttagacaggttaatgaagaacacttctcaacagtttcctttttgttttcctttataattcactaaaataaagcatctattagtgtctgaaaaaaaaaaaaaaaaa

SEQ ID NO: 663 - DNA, 2217 bp, Homo sapiens
gcggacccggcgccgaggcggccacccgagacgcggcgcgcacgctccggcctgcgcagcccggcccggccatggcggccccccgcccgtctcccgcgatctccgtttcggtctcggctccggctttttacgccccgcagaagaagttcggccctgtggtggccccaaagcccaaagtgaatcccttccggcccggggacagcgagcctcccccggcacccggggcccagcgcgcacagatgggccgggtgggcgagattcccccgccgcccccggaagactttcccctgcctccacctccccttgctggggatggcgacgatgcagagggtgctctgggaggtgccttcccgccgccccctcccccgatcgaggaatcatttccccctgcgcctctggaggaggagatcttcccttccccgccgcctcctccggaggaggagggagggcctgaggcccccataccgcccccaccacagcccagggagaaggtgagcagtattgatttggagatcgactctctgtcctcactgctggatgacatgaccaagaatgatcctttcaaagcccgggtgtcatctggatatgtgcccccaccagtggccactccattcagttccaagtccagtaccaagcctgcagccgggggcacagcacccctgcctccttggaagtccccttccagctcccagcctctgccccaggttccggctccggctcagagccagacacagttccatgttcagccccagccccagcccaagcctcaggtccaactccatgtccagtcccagacccagcctgtgtctttggctaacacccagccccgagggcccccagcctcatctccggctccagcccctaagttttctccagtgactcctaagtttactcctgtggcttccaagttcagtcctggagccccaggtggatctgggtcacaaccaaatcaaaaattggggcaccccgaagctctttctgctggcacaggctcccctcaacctcccagcttcacctatgcccagcagagggagaagccccgagtgcaggagaagcagcaccccgtgcccccaccggctcagaaccaaaaccaggtgcgctcccctggggccccagggcccctgactctgaaggaggtggaggagctggagcagctgacccagcagctaatgcaggacatggagcatcctcagaggcagaatgtggctgtcaacgaactctgcggccgatgccatcaacccctggcccgggcgcagccagccgtccgcgctctagggcagctgttccacatcgcctgcttcacctgccaccagtgtgcgcagcagctccagggccagcagttctacagtctggagggggcgccgtactgcgagggctgttacactgacaccctggagaagtgtaacacctgcggggagcccatcactgaccgcatgctgagggccacgggcaaggcctatcacccgcactgcttcacctgtgtggtctgcgcccgccccctggagggcacctccttcatcgtggaccaggccaaccggccccactgtgtccccgactaccacaagcagtacgccccgaggtgctccgtctgctctgagcccatcatgcctgagcctggccgagatgagactgtgcgagtggtcgccctggacaagaacttccacatgaagtgttacaagtgtgaggactgcgggaagcccctgtcgattgaggcagatgacaatggctgcttccccctggacggtcacgtgctctgtcggaagtgccacactgctagagcccagacctgagtgaggacaggccctcttcagaccgcagtccatgccccattgtggaccacccacactgagaccacctgcccccacctcagttattgttttgatgtctagcccctcccatttccaacccctccctagcatcccaggtgccctgacccaggacccaacatggtctagggatgcaggatccccgccctggggtctggtcctcgcccatcctgcagggattgcccaccgtcttccagacaccccacctgaggggggcaccaggtttagtgctgctgctttcactgctgcacccgcgccctcggccggccccccgagcagcctttgtactctgcttgcggagggctgggagaccctccaggacattcccaccctcccccatgctgccaagttgtagctatagctacaaataaaaaaaaaccttgttttccag

SEQ ID NO: 664 - DNA, 8906 bp, Homo sapiens
gaggcggccaaggacctggccgacatcgcggccttcttccgatccgggtttcgaaaaaacgatgaaatgaaagctatggatgttttaccaattttgaaggaaaaagttgcatacctttcaggtgggagagataaacgtggaggtcccattttaacgtttccggcccgcagcaatcatgacagaatacgacaggaggatctcaggagactcatttcctatctagcctgtattcccagcgaggaggtctgcaagcgtggcttcacggtgatcgtggacatgcgtgggtccaagtgggactccatcaagccccttctgaagatcctgcaggagtccttcccctgctgcatccatgtggccctgatcatcaagccagacaacttctggcagaaacagaggactaattttggcagttctaaatttgaatttgagacaaatatggtctctttagaaggccttaccaaagtagttgatccttctcagctaactcctgagtttgatggctgcctggaatacaaccacgaagaatggattgaaatcagagttgcttttgaagactacattagcaatgccacccacatgctgtctcggctggaggaacttcaggacatcctagctaagaaggagctgcctcaggatttagagggggctcggaatatgatcgaggaacattctcagctgaagaagaaggtgattaaggcccccatcgaggacctggatttggagggacagaagctgcttcagaggatacagagcagtgaaagctttcccaaaaagaactcaggctcaggcaatgcggacctgcagaacctcttgcccaaggtgtccaccatgctggaccggctgcactcgacacggcagcatctgcaccagatgtggcatgtgaggaagctgaagctggaccagtgcttccagctgaggctgtttgaacaggatgctgagaagatgtttgactggatcacacacaacaaaggcctgtttctaaacagctacacagagattgggaccagccaccctcatgccatggagcttcagacgcagcacaatcactttgccatgaactgtatgaacgtgtatgtaaatataaaccgcatcatgtcggtggccaatcgtctggtggagtctggccactatgcctcgcagcagatcaggcagatcgcgagtcagctggagcaggagtggaaggcgtttgcggcagccctggatgagcggagcaccttgctggacatgtcctccattttccaccagaaggccgaaaagtatatgagcaacgtggattcatggtgtaaagcttgcggtgaggtagaccttccctcagagctgcaggacctagaagatgccattcatcaccaccagggaatatatgaacatatcactcttgcttattctgaggtcagccaagatgggaagtcgctccttgacaagctccagcggcccttgactcccggcagctccgattccctgacagcctctgccaactactccaaggccgtgcaccatgtcctggatgtcatccacgaggtgctgcaccaccagcggcacgtgagaacaatctggcaacaccgcaaggtccggctgcatcagaggctgcagctgtgtgttttccagcaggaagttcagcaggtgctagactggatcgagaaccacggagaagcatttctgagcaaacatacaggtgtggggaaatctcttcatcgggccagagcattgcagaaacgtcatgaagattttgaagaagtggcacagaacacatacaccaatgcggataaattactggaagcagcagaacagctggctcagactggggaatgtgaccccgaagagatttatcaggctgcccatcagctggaagaccggattcaagatttcgttcggcgtgttgagcagcgaaagatcctactggacatgtcagtgtcctttcacacccatgtgaaagagctgtggacgtggctggaggagctgcagaaggagctgctggacgacgtgtatgccgagtcggtggaggccgtgcaggacctcatcaagcgctttggccagcagcagcagaccaccctgcaggtgactgtcaacgtgatcaaggaaggggaggacctcatccagcagctcagggactctgccatctccagtaacaagaccccccacaacagctccatcaaccacattgagacggtgctgcagcagctggacgaggcgcagtcgcagatggaggagctcttccaggagcgcaagatcaagctggagctcttcctgcacgtgcgcatcttcgagagggacgccatcgacattatctcagacctcgagtcttggaatgatgagctttctcagcaaatgaatgacttcgacacagaagatctcacgattgcagagcagcgcctccagcaccatgcagacaaagccttgaccatgaacaacttgacttttgacgtcatccaccaagggcaagatcttctgcagtatgtcaatgaggtccaggcctctggtgtggagctgctgtgtgatagagatgtagacatggcaactcgggtccaggacctgctggagtttcttcatgaaaaacagcaggaattggatttagccgcagagcagcatcggaaacacctggagcagtgcgtgcagctgcgccacctgcaggcagaagtgaaacaggtgctgggttggatccgcaacggagagtccatgttaaatgccggacttatcacagccagctcgttacaagaggcagagcagctccagcgagagcacgagcagttccagcatgccattgagaaaacacatcagagcgcgctgcaggtgcagcagaaggcagaagccatgctacaggccaaccactacgacatggacatgatccgggactgcgccgagaaggtggcgtctcactggcaacagctcatgctcaagatggaagatcgcctcaagctcgtcaacgcctctgtcgctttctacaaaacctcagagcaggtctgcagcgtcctcgagagcctggaacaggagtacaagagagaagaagactggtgtggcggggcggataagctgggcccaaactctgagacggaccacgtgacgcccatgatcagcaagcacctggagcagaaggaggcattcctgaaggcttgcacccttgctcggaggaatgcagacgtcttcctgaaatacctgcacaggaacagcgtgaacatgccaggaatggtgacgcacatcaaagctcctgaacagcaagtgaaaaatatcttgaatgaactcttccaacgggagaacagggtattgcattactggaccatgaggaagagacggctggaccagtgtcagcagtacgtggtctttgagaggagtgccaagcaggctttggaatggatccatgacaatggcgagttctacctttccacacacacctccacgggctccagtatacagcacacccaggagctcctgaaagagcacgaggagttccagataactgcaaagcaaaccaaagagagagtgaagctattgatacagctggctgatggcttttgtgaaaaagggcatgcccatgcggcagagataaaaaaatgtgttactgctgtggataagaggtacagagatttctctctgcggatggagaagtacaggacctctttggaaaaagccctggggatttcttcagattccaacaaatcgagtaaaagtctccagctagatatcattccagccagtatccctggctcagaggtgaaacttcgagatgctgctcatgaacttaatgaagagaagcggaaatctgcccgcaggaaagagttcataatggctgagctcattcaaactgaaaaggcttatgtaagagacctccgggaatgtatggatacgtacctgtgggaaatgaccagtggcgtggaagagattccacctggcattgtaaacaaagaactcatcatcttcggaaacatgcaagaaatctacgaatttcataataacatattcctaaaggagctggaaaaatatgaacagttgccagaggatgttggacattgttttgttacttgggcagacaagtttcagatgtatgtcacatattgcaaaaataagcctgattctactcagctgatattggaacatgcagggtcctattttgacgagatacagcagcgacatggattagccaattccatttcttcctaccttattaaaccagttcagcgaataacgaaatatcagctccttttaaaagagctgctgacgtgctgtgaggaaggaaagggagagattaaagatggcctggaggtgatgctcagcgtgccgaagcgagccaatgacgccatgcacctcagcatgctggaagggtttgatgaaaacattgagtctcagggagaactcatcctacaggaatccttccaagtgtgggacccaaaaaccttaattcgaaagggtcgagaacggcatctcttcctttttgaaatgtccttagtatttagtaaagaagtgaaagattccagtgggagaagcaagtacctttataaaagcaaattgtttacctcagagttgggtgtcacagaacatgttgaaggagacccttgcaaatttgcactgtgggtggggagaacaccaacttcagataataaaattgtccttaaggcttccagcatagagaacaagcaggactggataaagcatatccgcgaagtcatccaggagcggacgatccacctgaagggagccctgaaggagcccattcacatccctaagaccgctcccgccacaagacagaagggaaggagggatggagaggatctggacagccaaggagacggcagcagccagcctgatacgatttccatcgcctcacggacgtctcagaacacgctggacagcgataagctctctggtggctgtgagctgacagtggtgatccatgacttcaccgcttgcaacagcaacgagctgaccatccgacggggccagaccgtggaagttctggagcggccgcatgacaagcctgactggtgtctggtgcggaccactgaccgctccccagcggcagaaggcctggtcccctgtggttcactgtgcatcgcccactccagaagtagcatggaaatggagggcatcttcaaccacaaagactcgctctccgtctccagcaatgacgccagtccacccgcatccgtggcttccctccagccccacatgatcggggcccagagctcgccgggccccaagcggccgggcaacaccctgcgcaagtggctcaccagccccgtgcggcggctcagcagcggcaaggccgacgggcacgtgaagaagctggcgcacaagcacaagaagagccgcgaggtccgcaagagcgccgacgccggctcgcagaaggactccgacgacagtgcggccaccccgcaggacgagacggtcgaggagagaggccggaacgagggcctgagcagcggtactctctccaaatcctcctcctcggggatgcagagctgtggagaagaggaaggcgaggagggggccgacgccgtgcccctgccgccacccatggccatccagcagcacagcctcctccagccagactcacaggatgacaaggcctcttctcggttattagtccgccccaccagctccgaaacaccgagtgcagccgagctcgtcagtgcaattgaggaactcgtgaaaagcaagatggcactggaggatcgccccagctcactccttgttgaccagggagatagtagcagcccttccttcaacccttcggataattcccttctctcttcctcctcgcccattgatgagatggaagaaaggaaatccagctctttaaagagaagacactacgttttgcaagaactagtggagacagagcgtgactatgtgcgggaccttggctatgtggttgagggctacatggcacttatgaaagaagatggtgttcctgatgacatgaaaggaaaagacaaaattgtgttcggcaacatccatcagatttacgactggcacagagacttttttttaggagagttagagaagtgccttgaagatccagaaaaactaggatccctttttgttaaacacgagagaaggttgcacatgtacatagcttattgtcaaaataaaccaaagtctgagcacattgtctcagaatacattgataccttttttgaggacttaaagcagcgtcttggccacaggttacagctcacagatctgttgatcaaaccagtgcagagaatcatgaagtatcagctgttactgaaggacttcctcaagtattccaaaaaggccagcctggatacatcagaattagagagagctgtggaagtcatgtgcatagtacccaggcggtgcaacgacatgatgaacgtggggcggctgcaaggattcgacgggaaaatcgttgcccagggtaaactgctcttgcaggacacattcttggtcacagaccaagatgcaggacttctgcctcgctgcagagagaggcgcatcttcctctttgagcagatcgtcatattcagcgaaccacttgataaaaagaagggcttctccatgccgggattcctgtttaagaacagtatcaaggtgagttgcctttgcctggaggaaaatgtggaaaatgatccctgtaaatttgctctgacatcgaggacgggtgacgtggtagagaccttcattttgcattcatctagtccaagtgtccggcaaacttggatccatgaaatcaaccaaattttagaaaaccagcgcaattttttaaatgccttgacatcgccaatcgagtaccagaggaaccacagcgggggcggcggcggcggcggcagcggggcagcggcgggggtgggggcagcggcggcggcggggcccccagtggcggcagcggccacagtggcggccccagcagctgcggcggcgcccccagcacgagcaggagccggccctcccggatcccccagcctgtccgacaccacccccccgtgctggtctcctctgcagcctcgagccaggcagaggcagacaagatgtcagagtgaaagcagcagcagtagcaacatctccaccatgttggtgacacacgattacacggcagtgaaggaggatgagatcaacgtctaccaaggagaggtcgttcaaattctggccagcaaccagcagaacatgtttctggtgttccgagccgccactgaccagtgccccgcagctgagggctggattccaggctttgtcctgggccacaccagtgcagtcatcgtggagaacccggacgggactctcaagaagtcaacatcttggcacacagcactccgtttaaggaaaaaatctgagaaaaaagataaagacggcaaaagggaaggcaagttagagaacggttatcggaagtcacgggaaggactcagcaacaaggtatctgtgaagcttctcaatcccaactacatttatgacgttcccccagaattcgtcattccattgagtgaggtcacgtgtgagacaggggagaccgttgttcttagatgtcgagtctgtggccgccccaaagcctcaattacctggaagggccctgaacacaacaccttgaacaacgatggtcactacagcatctcctacagtgacctgggagaggccacgctgaagattgtgggcgtgaccacggaagatgacggcatctacacgtgcatcgctgtcaatgacatgggttcagcctcatcatcggccagcctgagggtcctaggtccagggatggatgggatcatggtgacctggaaagacaactttgactccttctacagtgaagtggctgagcttggcaggggcagattctctgtcgttaagaaatgtgatcagaaaggaaccaagcgagcagtggccactaagtttgtgaacaagaagttgatgaagcgcgaccaggtcacccatgagcttggcatcctgcagagcctccagcaccccctgcttgtcggcctcctcgacacctttgagacccccaccagctacatcctggtcttagaaatggctgaccagggtcgcctcctggactgcgtggtgcgatggggaagcctcactgaagggaagatcagggcgcacctgggggaggttctggaagctgtccggtacctgcacaactgcaggatagcacacctggacctaaagcctgagaatatcctggtggatgagagtttagccaagccaaccatcaaactggctgactttggagatgctgttcagctcaacacgacctactacatccaccagttactggggaaccctgaattcgcagcccctgaaatcatcctcgggaaccctgtctccctgacctcggatacgtggagtgttggagtgctcacatacgtacttcttagtggcgtgtcccccttcctggatgacagtgtggaagagacctgcctgaacatttgccgcttagactttagcttcccagatgactactttaaaggagtgagccagaaggccaaggagttcgtgtgcttcctcctgcaggaggaccccgccaagcgtccctcggctgcgctggccctccaggagcagtggctgcaggccggcaacggcagaagcacgggcgtcctcgacacgtccagactgacttccttcattgagcggcgcaaacaccagaatgatgttcgacctatccgtagcattaaaaactttctgcagagcaggcttctgcctagagtttgacctatccagaagttctttctcattctctttcacctgccaatcagctgttaatctgaattttcaagagaaaacaagcaaacataactgatcagctgccggtatgttcatcgtgtgaaattgcattccaagtgagctgtgctcagcagtgcttggacacagagctgcaagctgcgctggggtggaggaccgtcacttacactctgccaaggacggaggtcgcattgctgtatcacagtattttttacggatttctg

SEQ ID NO: 665 - DNA, 1204 bp, Homo sapiens
tcggcggcggtggtatcggcggcagctgtgagggggttccgggaagatggtgctgatcaaggaattccgtgtggttttgccatgttctgttcaggagtatcaggttgggcagctttactctgttgcagaagctagtaagaatgagactggtggtggagaaggaattgaagtcttaaagaatgaaccttatgagaaggatggagaaaagggacagtatacgcacaaaatttatcacctaaagagcaaagtgcctgcattcgtgaggatgattgctcccgagggctccttggtgtttcatgagaaagcctggaatgcgtacccctactgtagaacaattgtaacgaatgaatatatgaaagatgatttcttcattaaaatcgaaacatggcacaaaccagacttgggaacattagaaaatgtacatggtttagatccaaacacatggaaaactgttgaaattgtccatatagatattgcagatagaagtcaagttgaaccagcagactacaaagctgatgaagacccagcattattccagtcagtcaagaccaagagaggccctttgggacccaactggaagaaggagctggcaaacagccctgactgtccccagatgtgtgcctataagctggtgaccatcaaattcaagtggtggggactgcaaagcaaagtagaaaacttcattcaaaagcaagaaaaacggatatttacaaacttccatcgccagcttttttgttggattgacaagtggatcgatctcacgatggaagacattaggagaatggaagacgagactcagaaagaactagaaacaatgcgtaagaggggttccgttcgaggcacgtcggctgctgatgtctagatgagtcccctgtagggtcagagacaatgtcaaactgtttacgtaatcaaggtcaagtgaggggaacaagcgcagccagtgatgagtgaacaacaatctgaccagtatcttgcagtgttgacgtttcccagatgtgtgcttgtgatgatacacacacatgcacaggttctcaaccacgtgtgtatatatgtatgtgtgcatatgtctgtagctgtatataaagcgcatgtagagctacagatccagatacacacacttgtgtatatatgtacatacagacatactgaagggattagtacaatttctccaaagtactgtacctatcttcagcaagaatgcaaa

SEQ ID NO: 666 - protein, 892 aa, Homo sapiens
MDHYDSQQTNDYMQPEEDWDRDLLLDPAWEKQQRKTFTAWCNSHLRKAGTQIENIEEDFRDGLKLMLLLEVISGERLAKPERGKMRVHKISNVNKALDFIASKGVKLVSIGAEEIVDGNVKMTLGMIWTIILRFAIQDISVEETSAKEGLLLWCQRKTAPYKNVNIQNFHISWKDGLGFCALIHRHRPELIDYGKLRKDDPLTNLNTAFDVAEKYLDIPKMLDAEDIVGTARPDEKAIMTYVSSFYHAFSGAQKAETAANRICKVLAVNQENEQLMEDYEKLASDLLEWIRRTIPWLENRVPENTMHAMQQKLEDFRDYRRLHKPPKVQEKCQLEINFNTLQTKLRLSNRPAFMPSEGRMVSDINNAWGCLEQVEKGYEEWLLNEIRRLERLDHLAEKFRQKASIHEAWTDGKEAMLRQKDYETATLSEIKALLKKHEAFESDLAAHQDRVEQIAAIAQELNELDYYDSPSVNARCQKICDQWDNLGALTQKRREALERTEKLLETIDQLYLEYAKRAAPFNNWMEGAMEDLQDTFIVHTIEEIQGLTTAHEQFKATLPDADKERLAILGIHNEVSKIVQTYHVNMAGTNPYTTITPQEINGKWDHVRQLVPRRDQALTEEHARQQHNERLRKQFGAQANVIGPWIQTKMEEIGRISIEMHGTLEDQLSHLRQYEKSIVNYKPKIDQLEGDHQLIQEALIFDNKHTNYTMEHIRVGWEQLLTTIARTINEVENQILTRDAKGISQEQMNEFRASFNHFDRDHSGTLGPEEFKACLISLGYDIGNDPQGEAEFARIMSIVDPNRLGVVTFQAFIDFMSRETADTDTADQVMASFKILAGDKNYITMDELRRELPPDQAEYCIARMAPYTGPDSVPGALDYMSFSTALYGESDL

SEQ ID NO: 667 - protein, 197 aa, Homo sapiens
MMFPQSRHSGSSHLPQQLKFTTSDSCDRIKDEFQLLQAQYHSLKLECDKLASEKSEMQRHYVMYYEMSYGLNIEMHKQAEIVKRLNGICAQVLPYLSQEHQQQVLGAIERAKQVTAPELNSIIRQQLQAHQLSQLQALALPLTPLPVGLQPPSLPAVSAGTGLLSLSALGSQAHLSKEDKNGHDGDTHQEDDGEKSD

SEQ ID NO: 668 - protein, 739 aa, Homo sapiens
GDKEPTETIGDLSICLDGLQLESEVVTNGETTCSESASQNDDGSRSKDETRVSTNGSDDPEDAGAGENRRVSGNNSPSLSNGGFKPSRPPRPSRPPPPTPRRPASVNGSPSATSESDGSSTGSLPPTNTNTNTSEGATSGLIIPLTISGGSGPRPLNPVTQAPLPPGWEQRVDQHGRVYYVDHVEKRTTWDRPEPLPPGWERRVDNMGRIYYVDHFTRTTTWQRPTLESVRNYEQWQLQRSQLQGAMQQFNQRFIYGNQDLFATSQSKEFDPLGPLPPGWEKRTDSNGRVYFVNHNTRITQWEDPRSQGQLNEKPLPEGWEMRFTVDGIPYFVDHNRRTTTYIDPRTGKSALDNGPQIAYVRDFKAKVQYFRFWCQQLAMPQHIKITVTRKTLFEDSFQQIMSFSPQDLRRRLWVIFPGEEGLDYGGVAREWFFLLSHEVLNPMYCLFEYAGKDNYCLQINPASYINPDHLKYFRFIGRFIAMALFHGKFIDTGFSLPFYKRILNKPVGLKDLESIDPEFYNSLIWVKENNIEECDLEMYFSVDKEILGEIKSHDLKPNGGNILVTEENKEEYIRMVAEWRLSRGVEEQTQAFFEGFNEILPQQYLQYFDAKELEVLLCGMQEIDLNDWQRHAIYRHYARTSKQIMWFWQFVKEIDNEKRMRLLQFVTGTCRLPVGGFADLMGSNGPQKFCIEKVGKENWLPRSHTCFNRLDLPPYKSYEQLKEKLLFAIEETEGFGQE

SEQ ID NO: 669 - protein, 431 aa, Homo sapiens
GPPPTRALPLPQSLPPDFRLEPTAPALSPRSSFASSSASDASKPSSPRGSLLLDGAGAGGAGGSRPCSNRTSGISMGYDQRHGSPLPAGPCLFGPPLAGAPAGYSPGGVPSAYPELHAALDRLYAQRPAGFGCQESRHSYPPALGSPGALAGARVGAAGPLERRGAQPGRHSVTGYGDCAVGARYQDELTALLRLTVGTGGREAGARGEPSGIEPSGLEEPPGPFVPEAARARMREPEAREDYFGTCIKCNKGIYGQSNACQALDSLYHTQCFVCCSCGRTLRCKAFYSVNGSVYCEEDYLFSGFQEAAEKCCVCGHLILEKILQAMGKSYHPGCFRCIVCNKCLDGIPFTVDFSNQVYCVTDYHKNYAPKCAACGQPILPSEGCEDIVRVISMDRDYHFECYHCEDCRMQLSDEEGCCCFPLDGHLLCHG

SEQ ID NO: 670 - protein, 900 aa, Homo sapiens
GPGSRHHRARDRLIHFGAVSTDVLGCSAHCSLTQSPKMNIQEQGFPLDLGASFTEDAPRPPVPGEEGELVSTDPRPASYSFCSGKGVGIKGETSTATPRRSDLDLGYEPEGSASPTPPYLKWAESLHSLLDDQDGISLFRTFLKQEGCADLLDFWFACTGFRKLEPCDSNEEKRLKLARAIYRKYILDNNGIVSRQTKPATKSFIKGCIMKQLIDPAMFDQAQTEIQATMEENTYPSFLKSDIYLEYTRTGSESPKVCSDQSSGSGTGKGISGYLPTLNEDEEWKCDQDMDEDDGRDAAPPGRLPQKLLLETAAPRVSSSRRYSEGREFRYGSWREPVNPYYVNAGYALAPATSANDSEQQSLSSDADTLSLTDSSVDGIPPYRIRKQHRREMQESAQVNGRVPLPHIPRTYRVPKEVRVEPQKFAEELIHRLEAVQRTREAEEKLEERLKRVRMEEEGEDGDPSSGPPGPCHKLPPAPAWHHFPPRLCWTWACAGLRDAHEENPESILDEHVQRVLRTTGRQSPGPGHRSPDSGHVAKMPVALGGAASGHGKHVPKSGAKLDAAGLHHHRHVHHHVHHSTARPKEQVEAEATRRAQSSFAWGLEPHSHGARSRGYSESVGAAPNASDGLAHSGKVGVACKRNAKKAESGKSASTEVPGASEDAEKNQKIMQWIIEGEKEISRHRRTGHGSSGTRKPQPHENSRPLSLEHPWAGPQLRTSVQPSHLFIQDPTMPPHPAPNPLTQLEEARRRLEEEEKRASRAPSKQRYVQEVMRRGRACVRPACAPVLHVVPAVSDMELSETETRSQRKVGGGSAQPCDSIVVAYYFCGEPIPYRTLVRGRAVTLGQFKELLTKKGSYRYYFKKVSDEFDCGVVFEEVREDEAVLPVFEEKIIGKVEKVD

SEQ ID NO: 671 - protein, 591 aa, Homo sapiens
MVPVAVTAAVAPVLSINSDFSDLREIKKQLLLIAGLTRERGLLHSSKWSAELAFSLPALPLAELQPPPPITEEDAQDMDAYTLAKAYFDVKEYDRAAHFLHGCNSKKAYFLYMYSRYLSGEKKKDDETVDSLGPLEKGQVKNEALRELRVELSKKHQARELDGFGLYLYGVVLRKLDLVKEAIDVFVEATHVLPLHWGAWLELCNLITDKEMLKFLSLPDTWMKEFFLAHIYTELQLIEEALQKYQNLIDVGFSKSSYIVSQIAVAYHNIRDIDKALSIFNELRKQDPYRIENMDTFSNLLYVRSMKSELSYLAHNLCEIDKYRVETCCVIGNYYSLRSQHEKAALYFQRALKLNPRYLGAWTLMGHEYMEMKNTSAAIQAYRHAIEVNKRDYRAWYGLGQTYEILKMPFYCLYYYRRAHQLRPNDSRMLVALGECYEKLNQLVEAKKCYWRAYAVGDVEKMALVKLAKLHEQLTESEQAAQCYIKYIQDIYSCGEIVEHLEESTAFRYLAQYYFKCKLWDEASTCAQKCCAFNDTREEGKALLRQILQLRNQGETPTTEVPAPFFLPASLSANNTPTRRVSPLNLSSVTP

SEQ ID NO: 672 - protein, 914 aa, Homo sapiens
VYQVLLVGSTLLKEVPSGLQLEQLPSQSLLTHIPTAGLPTSLGGGLPYCHQAWLDFRRRLEALLQNCQAACALLQGAIESVKAVPQPMEPGEVGQLLQQTEVLMQQVLDSPWLAWLQCQGGRELTWLKQEVPEVTLSPDYRTAMDKADELYDRVDGLLHQLTLQSNQRIQALELVQTLEARESGLHQIEVWLQQVGWPALEEAGEPSLDMLLQAQGSFQELYQVAQEQVRQGEKFLQPLTGWEAAELDPPGARFLALRAQLTEFSRALAQRCQRLADAERLFQLFREALTWAEEGQRVLAELEQERPGVVLQQLQLHWTRHPDLPPAHFRKMWALATGLGSEAIRQECRWAWARCQDTWLALDQKLEASLKLPPVGSTASLCVSQVPAAPAHPPLRKAYSFDRNLGQSLSEPACHCHHAATIAACRRPEAGGGALPQASPTVPPPGSSDPRSLNRLQLVLAEMVATEREYVRALEYTMENYFPELDRPDVPQGLRGQRAHLFGNLEKLRDFHCHFFLRELEACTRHPPRVAYAFLRHRVQFGMYALYSKNKPRSDALMSSYGHTFFKDKQQALGDHLDLASYLLKPIQRMGKYALLLQELARACGGPTQELSALREAQSLVHFQLRHGNDLLAMDAIQGCDVNLKEQGQLVRQDEFVVRTGRHKSVRRIFLFEELLLFSKPRHGPTGVDTFAYKRSFKMADLGLTECCGNSNLRFEIWFRRRKARDTFVLQASSLAIKQAWTADISHLLWRQAVHNKEVRMAEMVSMGVGNKAFRDIAPSEEAINDRTVNYVLKCREVRSRASIAVAPFDHDSLYLGASNSLPGDPASCSVLGSLNLHLYRDPALLGLRCPLYPSFLEEAALEAEAELGGQPSLTAEDSEISSQCPSASGSSGSDSSCVSGQALGRGLEDLPCV

SEQ ID NO: 673 - protein, 277 aa, Homo sapiens [sequence omitted]

SEQ ID NO: 674 - protein, 1120 aa, Homo sapiens
MWRVKKLSLSLSPSPQTGKPSMRTPLRELTLQPGALTTSGKRSPACSSLTPSLCKLGLQEGSNNSSPVDFVNNKRTDLSSEHFSHSSKWLETCQHESDEQPLDPIPQISSTPKTSEEAVDPLGNYMVKTIVLVPSPLGQQQDMIFEARLDTMAETNSISLNGPLRTDDLVREEVAPCMGDRFSEVAAVSEKPIFQESPSHLLEESPPNPCSEQLHCSKESLSSRTEAVREDLVPSESNAFLPSSVLWLSPSTALAADFRVNHVDPEEEIVEHGAMEEREMRFPTHPKESETEDQALVSSVEDILSTCLTPNLVEMESQEAPGPAVEDVGRILGSDTESWMSPLAWLEKGVNTSVMLENLRQSLSLPSMLRDAAIGTTPFSTCSVGTWFTPSAPQEKSTNTSQTGLVGTKHSTSETEQLLCGRPPDLTALSRHDLEDNLLSSLVIVEFLSRQLRDWKSQLAVPHPETQDSSTQTDTSHSGITNKLQHLKESHEMGQALQQARNVMQSWVLISKELISLLHLSLLHLEEDKTTVNQESRRAETLVCCCFDLLKKLRAKLQSLKAEREEARHREEMALRGKDAAEIVLEAFCAHASQRISQLEQDLASMREFRGLLKDAQTQLVGLHAKQEELVQQTVSLTSTLQQDWRSMQLDYTTWTALLSRSRQLTEKLTVKSQQALQERDVAIEEKQEVSRVLEQVSAQLEECKGQTEQLELENIRLATDLRAQLQILANMDSQLKELQSQHTHCAQDLAMKDELLCQLTQSNEEQAAQCVKEEMALKHMQAELQQQQAVLAKEVRDLKETLEFADQENQVAHLELGQVECQLKTTLEVLRERSLQCENLKDTVENLTAKLASTIADNQEQDLEKTRQYSQKLGLLTEQLQSLTLFLQTKLKEKTEQETLLLSTACPPTQEHPLPNDRTFLGSILTAVADEEPESTPVPLLGSDKSAFTRVASMVSLQPAETPGMEESLAEMSIMTTELQSLCSLLQESKEEAIRTLQRKICELQARLQAQEEQHQEVQKAKEADIEKLNQALCLRYKNEKELQEVIQQNEKILEQIDKSGELISLREEVTHLTRSLRRAETETKVLQEAWQASWTPTASLWPPIGSRRKCGSLRRWTN

SEQ ID NO: 675 - protein, 540 aa, Homo sapiens
MGTTARAALVLTYLAVASAASEGGFTATGQRQLRPEHFQEVGYAAPPSPPLSRSLPMDHPDSSQHGPPFEGQSQVQPPPSQEATPLQQEKLLPAQLPAEKEVGPPLPQEAVPLQKELPSLQHPNEQKEGTPAPFGDQSHPEPESWNAAQHCQQDRSQGGWGHRLDGFPPGRPSPDNLNQICLPNRQHVVYGPWNLPQSSYSHLTRQGETLNFLEIGYSRCCHCRSHTNRLECAKLVWEEAMSRFCEAEFSVKTRPHWCCTRQGEARFSCFQEEAPQPHYQLRACPSHQPDISSGLELPFPPGVPTLDNIKNICHLRRFRSVPRNLPATDPLQRELLALIQLEREFQRCCRQGNNHTCTWKAWEDTLDKYCDREYAVKTHHHLCCRHPPSPTRDECFARRAPYPNYDRDILTIDISRVTPNLMGHLCGNQRVLTKHKHIPGLIHNMTARCCDLPFPEQACCAEEEKLTFINDLCGPRRNIWRDPALCCYLSPGDEQVNCFNINYLRNVALVSGDTENAKGQGEQGSTGGTNISSTSEPKEE

SEQ ID NO: 676 - protein, 462 aa, Homo sapiens [sequence omitted]

SEQ ID NO: 677 - protein, 2328 aa, Homo sapiens
KSKRQAQQMVQPQSPVAVSQSKPGCYDNGKHYQINQQWERTYLGNVLVCTCYGGSRGFNCESKPEAEETCFDKYTGNTYRVGDTYERPKDSMIWDCTCIGAGRGRISCTIANRCHEGGQSYKIGDTWRRPHETGGYMLECVCLGNGKGEWTCKPIAEKCFDHAAGTSYVVGETWEKPYQGWMMVDCTCLGEGSGRITCTSRNRCNDQDTRTSYRIGDTWSKKDNRGNLLQCICTGNGRGEWKCERHTSVQTTSSGSGPFTDVRAAVYQPQPHPQPPPYGHCVTDSGVVYSVGMQWLKTQGNKQMLCTCLGNGVSCQETAVTQTYGGNLNGEPCVLPFTYNGRTFYSCTTEGRQDGHLWCSTTSNYEQDQKYSFCTDHTVLVQTQGGNSNGALCHFPFLYNNHNYTDCTSEGRRDNMKWCGTTQNYDADQKFGFCPMAAHEEICTTNEGVMYRIGDQWDKQHDMGHMMRCTCVGNGRGEWTCIAYSQLRDQCIVDDITYNVNDTFHKRHEEGHMLNCTCFGQGRGRWKCDPVDQCQDSETGTFYQIGDSWEKYVHGVRYQCYCYGRGIGEWHCQPLQTYPSSSGPVEVFITETPSQPNSHPIQWNAPQPSHISKYILRWRPKNSVGRWKEATIPGHLNSYTIKGLKPGVVYEGQLISIQQYGHQEVTRFDFTTTSTSTPVTSNTVTGETTPFSPLVATSESVTEITASSFVVSWVSASDTVSGFRVEYELSEEGDEPQYLDLPSTATSVNIPDLLPGRKYIVNVYQISEDGEQSLILSTSQTTAPDAPPDPTVDQVDDTSIVVRWSRPQAPITGYRIVYSPSVEGSSTELNLPETANSVTLSDLQPGVQYNITIYAVEENQESTPVVIQQETTGTPRSDTVPSPRDLQFVEVTDVKVTIMWTPPESAVTGYRVDVIPVNLPGEHGQRLPISRNTFAEVTGLSPGVTYYFKVFAVSHGRESKPLTAQQTTKLDAPTNLQFVNETDSTVLVRWTPPRAQITGYRLTVGLTRRGQPRQYNVGPSVSKYPLRNLQPASEYTVSLVAIKGNQESPKATGVFTTLQPGSSIPPYNTEVTETTIVITWTPAPRIGFKLGVRPSQGGEAPREVTSDSGSIVVSGLTPGVEYVYTIQVLRDGQERDAPIVNKVVTPLSPPTNLHLEANPDTGVLTVSWERSTTPDITGYRITTTPTNGQQGNSLEEVVHADQSSCTFDNLSPGLEYNVSVYTVKDDKESVPISDTIIPAVPPPTDLRFTNIGPDTMRVTWAPPPSIDLTNFLVRYSPVKNEEDVAELSISPSDNAVVLTNLLPGTEYVVSVSSVYEQHESTPLRGRQKTGLDSPTGIDFSDITANSFTVHWIAPRATITGYRIRHHPEHFSGRPREDRVPHSRNSITLTNLTPGTEYVVSIVALNGREESPLLIGQQSTVSDVPRDLEVVAATPTSLLISWDAPAVTVRYYRITYGETGGNSPVQEFTVPGSKSTATISGLKPGVDYTITVYAVTGRGDSPASSKPISINYRTEIDKPSQMQVTDVQDNSISVKWLPSSSPVTGYRVTTTPKNGPGPTKTKTAGPDQTEMTIEGLQPTVEYVVSVYAQNPSGESQPLVQTAVTNIDRPKGLAFTDVDVDSIKIAWESPQGQVSRYRVTYSSPEDGIHELFPAPDGEEDTAELQGLRPGSEYTVSVVALHDDMESQPLIGTQSTAIPAPTDLKFTQVTPTSLSAQWTPPNVQLTGYRVRVTPKEKTGPMKEINLAPDSSSVVVSGLMVATKYEVSVYALKDTLTSRPAQGVVTTLENVSPPRRARVTDATETTITISWRTKTETITGFQVDAVPANGQTPIQRTIKPDVRSYTITGLQPGTDYKIYLYTLNDNARSSPVVIDASTAIDAPSNLRFLATTPNSLLVSWQPPRARITGYIIKYEKPGSPPREVVPRPRPGVTEATITGLEPGTEYTIYVIALKNNQKSEPLIGRKKTDELPQLVTLPHPNLHGPEILDVPSTVQKTPFVTHPGYDTGNGIQLPGTSGQQPSVGQQMIFEEHGFRRTTPPTTATPIRHRPRPYPPNVGQEALSQTTISWAPFQDTSEYIISCHPVGTDEEPLQFRVPGTSTSATLTGLTRGATYNIIVEALKDQQRHKVREEVVTVGNSVNEGLNQPTDDSCFDPYTVSHYAVGDEWERMSESGFKLLCQCLGFGSGHFRCDSSRWCHDNGVNYKIGEKWDRQGENGQMMSCTCLGNGKGEFKCDPHEATCYDDGKTYHVGEQWQKEYLGAICSCTCFGGQRGWRCDNCRRPGGEPSPEGTTGQSYNQYSQRYHQRTNTNVNCPIECFMPLDVQADREDSRE

SEQ ID NO: 678 - protein, 188 aa, Homo sapiens
HQTHKEGGSTHASADAWEIIELETEIEKFKAENASLAKLRIERESALEKLRKEIADFEQQKAKELARIEEFKKEEMRKLQKERKVFEKYTTAARTFPDKKEREEIQTLKQQIADLREDLKRKETKWSSTHSRLRSQIQMLVRENTDLREEIKVMERFRLDAWKRAEAIESSLEVEKKDKLANTSVRFQ

SEQ ID NO: 679 - protein, 284 aa, Homo sapiens
MEPGNYATLDGAKDIEGLLGAGGGRNLVAHSPLTSHPAAPTLMPAVNYAPLDLPGSAEPPKQCHPCPGVPQGTSPAPVPYGYFGGGYYSCRVSRSSLKPCAQAATLAAYPAETPTAGEEYPSRPTEFAFYPGYPGTYHAMASYLDVSVVQTLGAPGEPRHDSLLPVDSYQSWALAGGWNSQMCCQGEQNPPGPFWKAAFADSSGQHPPDACAFRRGRKKRIPYSKGQLRELEREYAANKFITKDKRRKISAATSLSERQITIWFQNRRVKEKKVLAKVKNSATP

SEQ ID NO: 680 - protein, 676 aa, Homo sapiens
MDKYDDLGLEASKFIEDLNMYEASKDGLFRVDKGAGNNPEFEETRRVFATKMAKIHLQQQQQQLLQEETLPRGSRGPVNGGGRLGPQARWEVVGSKLTVDGAAKPPLAASTGAPGAVTTLAAGQPPYPPQEQRSRPYLHGTRHGSQDCGSRESLATSEMSAFHQPGPCEDPSCLTHGDYYDNLSLASPKWGDKPGVSPSIGLSVGSGWPSSPGSDPPLPKPCGDHPLNHRQLSLSSSRSSEGSLGGQNSGIGGRSSEKPTGLWSTASSQRVSPGLPSPNLENGAPAVGPVQPRTPSVSAPLALSCPRQGGLPRSNSGLGGEVSGVMSKPNVDPQPWFQDGPKSYLSSSAPSSSPAGLDGSQQGAVPGLGPKPGCTDLGTGPKLSPTSLVHPVMSTLPELSCKEGPLGWSSDGSLGSVLLDSPSSPRVRLPCQPLVPGPELRPSAAELKLEALTQRLEREMDAHPKADYFGACVKCSKGVFGAGQACQAMGNLYHDTCFTCAACSRKLRGKAFYFVNGKVFCEEDFLYSGFQQSADRCFLCGHLIMDMILQALGKSYHPGCFRCVICNECLDGVPFTVDSENKIYCVRDYHKVLAPKCAACGLPILPPEGSDETIRVVSMDRDYHVECYHCEDCGLELNDEDGHRCYPLEDHLFCHSCHVKRLEKRPSSTALHQHHF

SEQ ID NO: 681 - protein, 296 aa, Homo sapiens
STGSEFPLCTKASPCSAARAGGRALGWRLQQQRETRGNPGNPGLGVAATMTGSNMSDALANAVCQRCQARFSPAERIVNSNGELYHEHCFVCAQCFRPFPEGLFYEFEGRKYCEHDFQMLFAPCCGSCGEFIIGRVIKAMNNNWHPGCFRCELCDVELADLGFVKNAGRHLCRPCHNREKAKGLGKYICQRCHLVIDEQPLMFRSDAYHPDHFNCTHCGKELTAEARELKGELYCLPCHDKMGVPICGACRRPIEGRVVNALGKQWHVEHFVCAKCEKPFLGHRHYEKKGLAYCEL

SEQ ID NO: 682 - protein, 500 aa, Homo sapiens
MGIGLSAQGVNMNRLPGWDKHSYGYHGDDGHSFCSSGTGQPYGPTFTTGDVIGCCVNLINNTCFYTKNGHSLGIAFTDLPPNLYPTVGLQTPGEVVDANFGQHPFVFDIEDYMREWRTKIQAQIDRFPIGDREGEWQTMIQKMVSSYLVHHGYCATAEAFARSTDQTVLEELASIKNRQRIQKLVLAGRMGEAIETTQQLYPSLLERNPNLLFTLKVRQFIEMVNGTDSEVRCLGGRSPKSQDSYPVSPRPFSSPSMSPSHGMNIHNLASGKGSTAHFSGFESCSNGVISNKAHQSYCHSNKHQSSNLNVPELNSINMSRSQQVNNFTSNDVDMETDHYSNGVGETSSNGFLNGSSKHDHEMEDCDTEMEVDSSQLRRQLCGGSQAAIERMIHFGRELQAMSEQLRRDCGKNTANKKMLKDAFSLLAYSDPWNSPVGNQLDPIQREPVCSALNSAILETHNLPKQPPLALAMGQATQCLGLMARSGIGSCAFATVEDYLH

SEQ ID NO: 683 - protein, 387 aa, Homo sapiens
MATSGVLPGGGFVASAAAVAGPEMQTGRNNFVIRRNPADPQRIPSNPSHRIQCAAGYEQSEHNVCQDIDECTAGTHNCRADQVCINLRGSFACQCPPGYQKRGEQCVDIDECTIPPYCHQRCVNTPGSFYCQCSPGFQLAANNYTCVDINECDASNQCAQQCYNILGSFICQCNQGYELSSDRLNCEDIDECRTSSYLCQYQCVNEPGKFSCMCPQGYQVVRSRTCQDINECETTNECREDEMCWNYHGGFRCYPRNPCQDPYILTPENRCVCPVSNAMCRELPQSIVYKYMSIRSDRSVPSDIFQIQATTIYANTINTFRIKSGNENGEFYLRQTSPVSAMLVLVKSLSGPREHIVDLEMLTVSSIGTFRTSSVLRLTIIVGPFSF

SEQ ID NO: 684 - protein, 531 aa, Homo sapiens [sequence omitted]

SEQ ID NO: 685 - protein, 480 aa, Homo sapiens
MAARCSTRWLLVVVGTPRLPAISGRGARPPREGVVGAWLSRKLSVPAFASSLTSCGPRALLTLRPGVSLTGTKHNPFICTASFHTSAPLAKEDYYQILGVPRNASQKEIKKAYYQLAKKYHPDTNKDDPKAKEKFSQLAEAYEVLSDEVKRKQYDAYGSAGFDPGASGSQHSYWKGGPTVDPEELFRKIFGEFSSSSFGDFQTVFDQPQEYFMELTFNQAAKGVNKEFTVNIMDTCERCNGKGNEPGTKVQHCHYCGGSGMETINTGPFVMRSTCRRCGGRGSIIISPCVVCRGAGQAKQKKRVMIPVPAGVEDGQTVRMPVGKREIFITFRVQKSPVFRRDGADIHSDLFISIAQALLGGTARAQGLYETINVTIPPGTQTDQKIRMGGKGIPRINSYGYGDHYIHIKIRVPKRLTSRQQSLILSYAEDETDVEGTVNGVTLTSSGGSTMDSSAGSKARREAGEDEEGFLSKLKKMFTS

SEQ ID NO: 686 - protein, 572 aa, Homo sapiens
MAAPRPSPAISVSVSAPAFYAPQKKFGPVVAPKPKVNPFRPGDSEPPPAPGAQRAQMGRVGEIPPPPPEDFPLPPPPLAGDGDDAEGALGGAFPPPPPPIEESFPPAPLEEEIFPSPPPPPEEEGGPEAPIPPPPQPREKVSSIDLEIDSLSSLLDDMTKNDPFKARVSSGYVPPPVATPFSSKSSTKPAAGGTAPLPPWKSPSSSQPLPQVPAPAQSQTQFHVQPQPQPKPQVQLHVQSQTQPVSLANTQPRGPPASSPAPAPKFSPVTPKFTPVASKFSPGAPGGSGSQPNQKLGHPEALSAGTGSPQPPSFTYAQQREKPRVQEKQHPVPPPAQNQNQVRSPGAPGPLTLKEVEELEQLTQQLMQDMEHPQRQNVAVNELCGRCHQPLARAQPAVRALGQLFHIACFTCHQCAQQLQGQQFYSLEGAPYCEGCYTDTLEKCNTCGEPITDRMLRATGKAYHPHCFTCVVCARPLEGTSFIVDQANRPHCVPDYHKQYAPRCSVCSEPIMPEPGRDETVRVVALDKNFHMKCYKCEDCGKPLSIEADDNGCFPLDGHVLCRKCHTARAQT

SEQ ID NO: 687 - protein, 2861 aa, Homo sapiens
MKAMDVLPILKEKVAYLSGGRDKRGGPILTFPARSNHDRIRQEDLRRLISYLACIPSEEVCKRGFTVIVDMRGSKWDSIKPLLKILQESFPCCIHVALIIKPDNFWQKQRTNFGSSKFEFETNMVSLEGLTKVVDPSQLTPEFDGCLEYNHEEWIEIRVAFEDYISNATHMLSRLEELQDILAKKELPQDLEGARNMIEEHSQLKKKVIKAPIEDLDLEGQKLLQRIQSSESFPKKNSGSGNADLQNLLPKVSTMLDRLHSTRQHLHQMWHVRKLKLDQCFQLRLFEQDAEKMFDWITHNKGLFLNSYTEIGTSHPHAMELQTQHNHFAMNCMNVYVNINRIMSVANRLVESGHYASQQIRQIASQLEQEWKAFAAALDERSTLLDMSSIFHQKAEKYMSNVDSWCKACGEVDLPSELQDLEDAIHHHQGIYEHITLAYSEVSQDGKSLLDKLQRPLTPGSSDSLTASANYSKAVHHVLDVIHEVLHHQRHVRTIWQHRKVRLHQRLQLCVFQQEVQQVLDWIENHGEAFLSKHTGVGKSLHRARALQKRHEDFEEVAQNTYTNADKLLEAAEQLAQTGECDPEEIYQAAHQLEDRIQDFVRRVEQRKILLDMSVSFHTHVKELWTWLEELQKELLDDVYAESVEAVQDLIKRFGQQQQTTLQVTVNVIKEGEDLIQQLRDSAISSNKTPHNSSINHIETVLQQLDEAQSQMEELFQERKIKLELFLHVRIFERDAIDIISDLESWNDELSQQMNDFDTEDLTIAEQRLQHHADKALTMNNLTFDVIHQGQDLLQYVNEVQASGVELLCDRDVDMATRVQDLLEFLHEKQQELDLAAEQHRKHLEQCVQLRHLQAEVKQVLGWIRNGESMLNAGLITASSLQEAEQLQREHEQFQHAIEKTHQSALQVQQKAEAMLQANHYDMDMIRDCAEKVASHWQQLMLKMEDRLKLVNASVAFYKTSEQVCSVLESLEQEYKREEDWCGGADKLGPNSETDHVTPMISKHLEQKEAFLKACTLARRNADVFLKYLHRNSVNMPGMVTHIKAPEQQVKNILNELFQRENRVLHYWTMRKRRLDQCQQYVVFERSAKQALEWIHDNGEFYLSTHTSTGSSIQHTQELLKEHEEFQITAKQTKERVKLLIQLADGFCEKGHAHAAEIKKCVTAVDKRYRDFSLRMEKYRTSLEKALGISSDSNKSSKSLQLDIIPASIPGSEVKLRDAAHELNEEKRKSARRKEFIMAELIQTEKAYVRDLRECMDTYLWEMTSGVEEIPPGIVNKELIIFGNMQEIYEFHNNIFLKELEKYEQLPEDVGHCFVTWADKFQMYVTYCKNKPDSTQLILEHAGSYFDEIQQRHGLANSISSYLIKPVQRITKYQLLLKELLTCCEEGKGEIKDGLEVMLSVPKRANDAMHLSMLEGFDENIESQGELILQESFQVWDPKTLIRKGRERHLFLFEMSLVFSKEVKDSSGRSKYLYKSKLFTSELGVTEHVEGDPCKFALWVGRTPTSDNKIVLKASSIENKQDWIKHIREVIQERTIHLKGALKEPIHIPKTAPATRQKGRRDGEDLDSQGDGSSQPDTISIASRTSQNTLDSDKLSGGCELTVVIHDFTACNSNELTIRRGQTVEVLERPHDKPDWCLVRTTDRSPAAEGLVPCGSLCIAHSRSSMEMEGIFNHKDSLSVSSNDASPPASVASLQPHMIGAQSSPGPKRPGNTLRKWLTSPVRRLSSGKADGHVKKLAHKHKKSREVRKSADAGSQKDSDDSAATPQDETVEERGRNEGLSSGTLSKSSSSGMQSCGEEEGEEGADAVPLPPPMAIQQHSLLQPDSQDDKASSRLLVRPTSSETPSAAELVSAIEELVKSKMALEDRPSSLLVDQGDSSSPSFNPSDNSLLSSSSPIDEMEERKSSSLKRRHYVLQELVETERDYVRDLGYVVEGYMALMKEDGVPDDMKGKDKIVFGNIHQIYDWHRDFFLGELEKCLEDPEKLGSLFVKHERRLHMYIAYCQNKPKSEHIVSEYIDTFFEDLKQRLGHRLQLTDLLIKPVQRIMKYQLLLKDFLKYSKKASLDTSELERAVEVMCIVPRRCNDMMNVGRLQGFDGKIVAQGKLLLQDTFLVTDQDAGLLPRCRERRIFLFEQIVIFSEPLDKKKGFSMPGFLFKNSIKVSCLCLEENVENDPCKFALTSRTGDVVETFILHSSSPSVRQTWIHEINQILENQRNFLNALTSPIEYQRNHSGGGGGGGSGAAAGVGAAAAAGPPVAAAATVAAPAAAAAPPARAGAGPPGSPSLSDTTPPCWSPLQPRARQRQTRCQSESSSSSNISTMLVTHDYTAVKEDEINVYQGEVVQILASNQQNMFLVFRAATDQCPAAEGWIPGFVLGHTSAVIVENPDGTLKKSTSWHTALRLRKKSEKKDKDGKREGKLENGYRKSREGLSNKVSVKLLNPNYIYDVPPEFVIPLSEVTCETGETVVLRCRVCGRPKASITWKGPEHNTLNNDGHYSISYSDLGEATLKIVGVTTEDDGIYTCIAVNDMGSASSSASLRVLGPGMDGIMVTWKDNFDSFYSEVAELGRGRFSVVKKCDQKGTKRAVATKFVNKKLMKRDQVTHELGILQSLQHPLLVGLLDTFETPTSYILVLEMADQGRLLDCVVRWGSLTEGKIRAHLGEVLEAVRYLHNCRIAHLDLKPENILVDESLAKPTIKLADFGDAVQLNTTYYIHQLLGNPEFAAPEIILGNPVSLTSDTWSVGVLTYVLLSGVSPFLDDSVEETCLNICRLDFSFPDDYFKGVSQKAKEFVCFLLQEDPAKRPSAALALQEQWLQAGNGRSTGVLDTSRLTSFIERRKHQNDVRPIRSIKNFLQSRLLPRV

SEQ ID NO: 688 - protein, 271 aa, Homo sapiens
MVLIKEFRVVLPCSVQEYQVGQLYSVAEASKNETGGGEGIEVLKNEPYEKDGEKGQYTHKIYHLKSKVPAFVRMIAPEGSLVFHEKAWNAYPYCRTIVTNEYMKDDFFIKIETWHKPDLGTLENVHGLDPNTWKTVEIVHIDIADRSQVEPADYKADEDPALFQSVKTKRGPLGPNWKKELANSPDCPQMCAYKLVTIKFKWWGLQSKVENFIQKQEKRIFTNFHRQLFCWIDKWIDLTMEDIRRMEDETQKELETMRKRGSVRGTSAADV

SEQ ID NO: 689 - DNA, 21 bp, Homo sapiens
gtcagcctggaggagttctca

SEQ ID NO: 690 - DNA, 22 bp, Homo sapiens
tcacccttggcaatacagatgt

SEQ ID NO: 691 - DNA, 21 bp, Homo sapiens
cccacccatgtgcccgtgaca

SEQ ID NO: 692 - DNA, 19 bp, Homo sapiens
cgtgattgccgacgatctc

SEQ ID NO: 693 - DNA, 19 bp, Homo sapiens
ttccggccgctagtcttgt

SEQ ID NO: 694 - DNA, 26 bp, Homo sapiens
cgcacccgttcggtctgacgcagtac

SEQ ID NO: 695 - DNA, 22 bp, Homo sapiens
ctttccccacgagtatgttggt

SEQ ID NO: 696 - DNA, 19 bp, Homo sapiens
aagggaccgtgctgtgagc

SEQ ID NO: 697 - DNA, 29 bp, Homo sapiens
agcccctcatgtgcctctcaacttcatag

SEQ ID NO: 698 - protein, 6 aa, Artificial Sequence
  partial signal sequence of HBM and Zmax1
SPAHSS

SEQ ID NO: 699 - DNA, 25 bp, Artificial Sequence
  synthetic duplex
tcgaccaccatggaggcagcgccgc

SEQ ID NO: 700 - DNA, 25 bp, Artificial Sequence
  synthetic duplex
ggtggtacctccgtcgcggcgggcc

SEQ ID NO: 701 - DNA, 55 bp, Artificial Sequence
  synthetic duplex
catgtgtgaaatcaccaagccgccctcagacgacagcccggcccacagcagtggc

SEQ ID NO: 702 - DNA, 63 bp, Artificial Sequence
  synthetic duplex
tcgagtacacactttagtggttcggcgggagtctgctgtcgggccgggtgtcgtcaccgccgg

SEQ ID NO: 703 - protein, 17 aa, Artificial Sequence
  peptide from Zmax1 sequence (SEQ ID NO: 3)
VETPRIERAGMDGSTRK

SEQ ID NO: 704 - protein, 15 aa, Artificial Sequence
  peptide from Zmax1 sequence (SEQ ID NO: 3)
NKRTGGKRKEILSAL

SEQ ID NO: 705 - protein, 12 aa, Artificial Sequence
  peptide from Zmax1 sequence (SEQ ID NO: 3)
ERQPFFHTRCEE

SEQ ID NO: 706 - protein, 15 aa, Artificial Sequence
  peptide from Zmax1 sequence (SEQ ID NO: 3)
VDGTKRRTLLEDKLP

SEQ ID NO: 707 - protein, 15 aa, Artificial Sequence
  peptide from Zmax1 sequence (SEQ ID NO: 3)
DGLNDCMHNNGQCGQ

SEQ ID NO: 708 - protein, 12 aa, Artificial Sequence
  peptide from Zmax1 sequence (SEQ ID NO: 3)
PFVLTSLSQGQN

SEQ ID NO: 709 - protein, 15 aa, Artificial Sequence
  peptide from Zmax1 sequence (SEQ ID NO: 3)
YAGANGPFPHEYVSG

SEQ ID NO: 710 - protein, 13 aa, Artificial Sequence
  peptide from Zmax1 sequence (SEQ ID NO: 3)
ACGKSMMSSVSLM

SEQ ID NO: 711 - protein, 18 aa, Artificial Sequence
  peptide from Zmax1 sequence (SEQ ID NO: 3)
RWKASKYYLDLNSDSDPY

SEQ ID NO: 712 - protein, 15 aa, Artificial Sequence
  peptide from Zmax1 sequence (SEQ ID NO: 3)
SGWNECASSNGHCSH

SEQ ID NO: 713 - protein, 14 aa, Artificial Sequence
  peptide from Zmax1 sequence (SEQ ID NO: 3)
NGDANCQDKSDEKN

SEQ ID NO: 714 - protein, 22 aa, Homo sapiens
IKRAKDDGTQPFVLTSLSQGQN

SEQ ID NO: 715 - DNA, 38 bp, Artificial Sequence
  primer
cgtacgtaaagcggccgcttggcaatacagatgtggga

SEQ ID NO: 716 - DNA, 37 bp, Artificial Sequence
  primer
cgtacgtaaagcggccgcagtagctcctctcggtggc

SEQ ID NO: 717 - DNA, 37 bp, Artificial Sequence
  primer
cgtacgtaaagcggccgcgctcatcatggactttccg

SEQ ID NO: 718 - DNA, 37 bp, Artificial Sequence
  primer
cgtacgtaaagcggccgcgcactgctgtttgatgagg

SEQ ID NO: 719 - DNA, 38 bp, Artificial Sequence
  primer
cgtacgtaaagcggccgcgagtgtggaagaaaggctgc

SEQ ID NO: 720 - DNA, 38 bp, Artificial Sequence
  primer
cgtacgtaaagcggccgcagtagagcttcccctcctgc

SEQ ID NO: 721 - DNA, 38 bp, Artificial Sequence
  primer
cgtacgtaaagcggccgcgtccatcacgaagtccaggt

SEQ ID NO: 722 - DNA, 18 bp, Artificial Sequence
  primer
cagcggcctggaggatgc

SEQ ID NO: 723 - DNA, 19 bp, Artificial Sequence
  primer
cggtccagtagaggtttcg

SEQ ID NO: 724 - DNA, 19 bp, Artificial Sequence
  primer
catcagccgcgccttcatg

SEQ ID NO: 725 - DNA, 20 bp, Artificial Sequence
  primer
cctgcatgttggtgaagtac

SEQ ID NO: 726 - DNA, 24 bp, Artificial Sequence
  primer
gcccgaaacctctactggaccgac

SEQ ID NO: 727 - DNA, 24 bp, Artificial Sequence
  primer
gcccaccccatcacagttcacatt

SEQ ID NO: 728 - DNA, 18 bp, Artificial Sequence
  primer
cagcggcctggaggatgc

SEQ ID NO: 729 - DNA, 29 bp, Artificial Sequence
  primer
cgggtacatgtactggacagctgattagc

SEQ ID NO: 730 - DNA, 21 bp, Homo sapiens
gtcagcctggaggagttctca

SEQ ID NO: 731 - DNA, 22 bp, Homo sapiens
tcacccttggcaatacagatgt

SEQ ID NO: 732 - DNA, 21 bp, Homo sapiens
cccacccatgtgcccgtgaca

SEQ ID NO: 733 - DNA, 19 bp, Homo sapiens
cgtgattgccgacgatctc

SEQ ID NO: 734 - DNA, 19 bp, Homo sapiens
ttccggccgctagtcttgt

SEQ ID NO: 735 - DNA, 26 bp, Homo sapiens
cgcacccgttcggtctgacgcagtac

SEQ ID NO: 736 - DNA, 22 bp, Mouse
ctttccccacgagtatgttggt

SEQ ID NO: 737 - DNA, 19 bp, Mouse
aagggaccgtgctgtgagc

SEQ ID NO: 738 - DNA, 29 bp, Mouse
agcccctcatgtgcctctcaacttcatag

SEQ ID NO: 739 - DNA, 20 bp, Artificial Sequence
  primer
gagcgggcagggatggatgg

SEQ ID NO: 740 - DNA, 22 bp, Artificial Sequence
  primer
aggttggcacggtggatgaagc

SEQ ID NO: 741 - DNA, 40 bp, Artificial Sequence
  primer
aagcttgtttaaactgggcatggtggcacatggttgtaat

SEQ ID NO: 742 - DNA, 34 bp, Artificial Sequence
  primer
gggcttccacccagtcagtccagtacatgtacct

SEQ ID NO: 743 - DNA, 30 bp, Artificial Sequence
  primer
ctgactgggtggaagcaccccggatcgagc

SEQ ID NO: 744 - DNA, 33 bp, Artificial Sequence
  primer
gaattcatcggtacctgtgcggccgcttcattg

SEQ ID NO: 745 - DNA, 20 bp, Artificial Sequence
  primer
tgagatgtcctgtctgtggc

SEQ ID NO: 746 - DNA, 20 bp, Artificial Sequence
  primer
tccttccttccctacagttg

SEQ ID NO: 747 - DNA, 25 bp, Artificial Sequence
  primer
cctaaggatctccttgtgtctgtgg

SEQ ID NO: 748 - DNA, 22 bp, Artificial Sequence
  primer
ctgcagcaggtcagtagcctgc

SEQ ID NO: 749 - DNA, 20 bp, Artificial Sequence
  primer
tgagatgtcctgtctgtggc

SEQ ID NO: 750 - DNA, 20 bp, Artificial Sequence
  primer
tccttccttccctacagttg

SEQ ID NO: 751 - DNA, 21 bp, Artificial Sequence
  primer
gcttctggcgtgtgaccggcg

SEQ ID NO: 752 - DNA, 22 bp, Artificial Sequence
  primer
gccgcacagcgccagcagcagc

SEQ ID NO: 753 - DNA, 22 bp, Artificial Sequence
  primer
cacccacgccccacagccagta

SEQ ID NO: 754 - DNA, 24 bp, Artificial Sequence
  primer
atttgccctcccatatgtccttcc

SEQ ID NO: 755 - DNA, 24 bp, Artificial Sequence
  primer
ttcctcccagccctcctccatcag

SEQ ID NO: 756 - DNA, 22 bp, Artificial Sequence
  primer
gccgcacagcgccagcagcagc

SEQ ID NO: 757 - DNA, 19 bp, Artificial Sequence
  primer
gaatggcgcccccgacgac

SEQ ID NO: 758 - DNA, 24 bp, Artificial Sequence
  primer
gctcccattcatcagttccatagg

SEQ ID NO: 759 - DNA, 5278 bp, Mouse
tctagactcgaggcggccgcccattgtgcactaaagcgccgccgccgcgccatggagcccgagtgagcgcggcgcgggcccgtccggccgccggacaacatggaggcagcgccgcccgggccgccgtggccgctgctgctgctgctgctgctgctgctggcgctgtgcggctgcccggcccccgccgcggcctcgccgctcctgctatttgccaaccgccgggacgtacggctggtggacgccggcggagtcaagctggagtccaccatcgtggtcagcggcctggaggatgcggccgcagtggacttccagttttccaagggagccgtgtactggacagacgtgagcgaggaggccatcaagcagacctacctgaaccagacgggggccgccgtgcagaacgtggtcatctccggcctggtctctcccgacggcctcgcctgcgactgggtgggcaagaagctgtactggacggactcagagaccaaccgcatcgaggtggccaacctcaatggcacatcccggaaggtgctcttctggcaggaccttgaccagccgagggccatcgccttggaccccgctcacgggtacatgtactggacagactgggttgagacgccccggattgagcgggcagggatggatggcagcacccggaagatcattgtggactcggacatttactggcccaatggactgaccatcgacctggaggagcagaagctctactgggctgacgccaagctcagcttcatccaccgtgccaacctggacggctcgttccggcagaaggtggtggagggcagcctgacgcaccccttcgccctgacgctctccggggacactctgtactggacagactggcagacccgctccatccatgcctgcaacaagcgcactggggggaagaggaaggagatcctgagtgccctctactcacccatggacatccaggtgctgagccaggagcggcagcctttcttccacactcgctgtgaggaggacaatggcggctgctcccacctgtgcctgctgtccccaagcgagcctttctacacatgcgcctgccccacgggtgtgcagctgcaggacaacggcaggacgtgtaaggcaggagccgaggaggtgctgctgctggcccggcggacggacctacggaggatctcgctggacacgccggacttcaccgacatcgtgctgcaggtggacgacatccggcacgccattgccatcgactacgacccgctagagggctatgtctactggacagatgacgaggtgcgggccatccgcagggcgtacctggacgggtctggggcgcagacgctggtcaacaccgagatcaacgaccccgatggcatcgcggtcgactgggtggcccgaaacctctactggaccgacacgggcacggaccgcatcgaggtgacgcgcctcaacggcacctcccgcaagatcctggtgtcggaggacctggacgagccccgagccatcgcactgcaccccgtgatgggcctcatgtactggacagactggggagagaaccctaaaatcgagtgtgccaacttggatgggcaggagcggcgtgtgctggtcaatgcctccctcgggtggcccaacggcctggccctggacctgcaggaggggaagctctactggggagacgccaagacagacaagatcgaggtgatcaatgttgatgggacgaagaggcggaccctcctggaggacaagctcccgcacattttcgggttcacgctgctgggggacttcatctactggactgactggcagcgccgcagcatcgagcgggtgcacaaggtcaaggccagccgggacgtcatcattgaccagctgcccgacctgatggggctcaaagctgtgaatgtggccaaggtcgtcggaaccaacccgtgtgcggacaggaacggggggtgcagccacctgtgcttcttcacaccccacgcaacccggtgtggctgccccatcggcctggagctgctgagtgacatgaagacctgcatcgtgcctgaggccttcttggtcttcaccagcagagccgccatccacaggatctccctcgagaccaataacaacgacgtggccatcccgctcacgggcgtcaaggaggcctcagccctggactttgatgtgtccaacaaccacatctactggacagacgtcagcctgaagaccatcagccgcgccttcatgaacgggagctcggtggagcacgtggtggagtttggccttgactaccccgagggcatggccgttgactggatgggcaagaacctctactgggccgacactgggaccaacagaatcgaagtggcgcggctggacgggcagttccggcaagtcctcgtgtggagggacttggacaacccgaggtcgctggccctggatcccaccaagggctacatctactggaccgagtggggcggcaagccgaggatcgtgcgggccttcatggacgggaccaactgcatgacgctggtggacaaggtgggccgggccaacgacctcaccattgactacgctgaccagcgcctctactggaccgacctggacaccaacatgatcgagtcgtccaacatgctgggtcaggagcgggtcgtgattgccgacgatctcccgcacccgttcggtctgacgcagtacagcgattatatctactggacagactggaatctgcacagcattgagcgggccgacaagactagcggccggaaccgcaccctcatccagggccacctggacttcgtgatggacatcctggtgttccactcctcccgccaggatggcctcaatgactgtatgcacaacaacgggcagtgtgggcagctgtgccttgccatccccggcggccaccgctgcggctgcgcctcacactacaccctggaccccagcagccgcaactgcagcccgcccaccaccttcttgctgttcagccagaaatctgccatcagtcggatgatcccggacgaccagcacagcccggatctcatcctgcccctgcatggactgaggaacgtcaaagccatcgactatgacccactggacaagttcatctactgggtggatgggcgccagaacatcaagcgagccaaggacgacgggacccagccctttgttttgacctctctgagccaaggccaaaacccagacaggcagccccacgacctcagcatcgacatctacagccggacactgttctggacgtgcgaggccaccaataccatcaacgtccacaggctgagcggggaagccatgggggtggtgctgcgtggggaccgcgacaagcccagggccatcgtcgtcaacgcggagcgagggtacctgtacttcaccaacatgcaggaccgggcagccaagatcgaacgcgcagccctggacggcaccgagcgcgaggtcctcttcaccaccggcctcatccgccctgtggccctggtggtagacaacacactgggcaagctgttctgggtggacgcggacctgaagcgcattgagagctgtgacctgtcaggggccaaccgcctgaccctggaggacgccaacatcgtgcagcctctgggcctgaccatccttggcaagcatctctactggatcgaccgccagcagcagatgatcgagcgtgtggagaagaccaccggggacaagcggactcgcatccagggccgtgtcgcccacctcactggcatccatgcagtggaggaagtcagcctggaggagttctcagcccacccatgtgcccgtgacaatggtggctgctcccacatctgtattgccaagggtgatgggacaccacggtgctcatgcccagtccacctcgtgctcctgcagaacctgctgacctgtggagagccgcccacctgctccccggaccagtttgcatgtgccacaggggagatcgactgtatccccggggcctggcgctgtgacggctttcccgagtgcgatgaccagagcgacgaggagggctgccccgtgtgctccgccgcccagttcccctgcgcgcggggtcagtgtgtggacctgcgcctgcgctgcgacggcgaggcagactgtcaggaccgctcagacgaggcggactgtgacgccatctgcctgcccaaccagttccggtgtgcgagcggccagtgtgtcctcatcaaacagcagtgcgactccttccccgactgtatcgacggctccgacgagctcatgtgtgaaatcaccaagccgccctcagacgacagcccggcccacagcagtgccatcgggcccgtcattggcatcatcctctctctcttcgtcatgggtggtgtctattttgtgtgccagcgcgtggtgtgccagcgctatgcgggggccaacgggcccttcccgcacgagtatgtcagcgggaccccgcacgtgcccctcaatttcatagccccgggcggttcccagcatggccccttcacaggcatcgcatgcggaaagtccatgatgagctccgtgagcctgatggggggccggggcggggtgcccctctacgaccggaaccacgtcacaggggcctcgtccagcagctcgtccagcacgaaggccacgctgtacccgccgatcctgaacccgccgccctccccggccacggacccctccctgtacaacatggacatgttctactcttcaaacattccggccactgcgagaccgtacaggccctacatcattcgaggaatggcgcccccgacgacgccctgcagcaccgacgtgtgtgacagcgactacagcgccagccgctggaaggccagcaagtactacctggatttgaactcggactcagacccctatccacccccacccacgccccacagccagtacctgtcggcggaggacagctgcccgccctcgcccgccaccgagaggagctacttccatctcttcccgccccctccgtccccctgcacggactcatcctgacctcggccgggccactctggcttctctgtgcccctgtaaatagttttaaatatgaacaaagaaaaaaatatattttatgatttaaaaaataaatataattgggattttaaaaacatgagaaatgtgaactgtgatggggtgggcagggctgggagaactttgtacagtggagaaatatttataaacttaattttgtaaaacagaaaaaaaaaaaaaaaaaaaaaaaaaaaaaaaaaaaaaaaaaaaaaaaaaaaaaaaaaaaaaaaaaaaaaaaaaaaaaaaaaaaaaaaaaaaaaaaaaaaaaaaaaaaaaaaaaaaaaaaagcggccgc

SEQ ID NO: 760 - DNA, 5278 bp, Homo sapiens
tctagactcgaggcggccgcccattgtgcactaaagcgccgccgccgcgccatggagcccgagtgagcgcggcgcgggcccgtccggccgccggacaacatggaggcagcgccgcccgggccgccgtggccgctgctgctgctgctgctgctgctgctggcgctgtgcggctgcccggcccccgccgcggcctcgccgctcctgctatttgccaaccgccgggacgtacggctggtggacgccggcggagtcaagctggagtccaccatcgtggtcagcggcctggaggatgcggccgcagtggacttccagttttccaagggagccgtgtactggacagacgtgagcgaggaggccatcaagcagacctacctgaaccagacgggggccgccgtgcagaacgtggtcatctccggcctggtctctcccgacggcctcgcctgcgactgggtgggcaagaagctgtactggacggactcagagaccaaccgcatcgaggtggccaacctcaatggcacatcccggaaggtgctcttctggcaggaccttgaccagccgagggccatcgccttggaccccgctcacgggtacatgtactggacagactggggtgagacgccccggattgagcgggcagggatggatggcagcacccggaagatcattgtggactcggacatttactggcccaatggactgaccatcgacctggaggagcagaagctctactgggctgacgccaagctcagcttcatccaccgtgccaacctggacggctcgttccggcagaaggtggtggagggcagcctgacgcaccccttcgccctgacgctctccggggacactctgtactggacagactggcagacccgctccatccatgcctgcaacaagcgcactggggggaagaggaaggagatcctgagtgccctctactcacccatggacatccaggtgctgagccaggagcggcagcctttcttccacactcgctgtgaggaggacaatggcggctgctcccacctgtgcctgctgtccccaagcgagcctttctacacatgcgcctgccccacgggtgtgcagctgcaggacaacggcaggacgtgtaaggcaggagccgaggaggtgctgctgctggcccggcggacggacctacggaggatctcgctggacacgccggacttcaccgacatcgtgctgcaggtggacgacatccggcacgccattgccatcgactacgacccgctagagggctatgtctactggacagatgacgaggtgcgggccatccgcagggcgtacctggacgggtctggggcgcagacgctggtcaacaccgagatcaacgaccccgatggcatcgcggtcgactgggtggcccgaaacctctactggaccgacacgggcacggaccgcatcgaggtgacgcgcctcaacggcacctcccgcaagatcctggtgtcggaggacctggacgagccccgagccatcgcactgcaccccgtgatgggcctcatgtactggacagactggggagagaaccctaaaatcgagtgtgccaacttggatgggcaggagcggcgtgtgctggtcaatgcctccctcgggtggcccaacggcctggccctggacctgcaggaggggaagctctactggggagacgccaagacagacaagatcgaggtgatcaatgttgatgggacgaagaggcggaccctcctggaggacaagctcccgcacattttcgggttcacgctgctgggggacttcatctactggactgactggcagcgccgcagcatcgagcgggtgcacaaggtcaaggccagccgggacgtcatcattgaccagctgcccgacctgatggggctcaaagctgtgaatgtggccaaggtcgtcggaaccaacccgtgtgcggacaggaacggggggtgcagccacctgtgcttcttcacaccccacgcaacccggtgtggctgccccatcggcctggagctgctgagtgacatgaagacctgcatcgtgcctgaggccttcttggtcttcaccagcagagccgccatccacaggatctccctcgagaccaataacaacgacgtggccatcccgctcacgggcgtcaaggaggcctcagccctggactttgatgtgtccaacaaccacatctactggacagacgtcagcctgaagaccatcagccgcgccttcatgaacgggagctcggtggagcacgtggtggagtttggccttgactaccccgagggcatggccgttgactggatgggcaagaacctctactgggccgacactgggaccaacagaatcgaagtggcgcggctggacgggcagttccggcaagtcctcgtgtggagggacttggacaacccgaggtcgctggccctggatcccaccaagggctacatctactggaccgagtggggcggcaagccgaggatcgtgcgggccttcatggacgggaccaactgcatgacgctggtggacaaggtgggccgggccaacgacctcaccattgactacgctgaccagcgcctctactggaccgacctggacaccaacatgatcgagtcgtccaacatgctgggtcaggagcgggtcgtgattgccgacgatctcccgcacccgttcggtctgacgcagtacagcgattatatctactggacagactggaatctgcacagcattgagcgggccgacaagactagcggccggaaccgcaccctcatccagggccacctggacttcgtgatggacatcctggtgttccactcctcccgccaggatggcctcaatgactgtatgcacaacaacgggcagtgtgggcagctgtgccttgccatccccggcggccaccgctgcggctgcgcctcacactacaccctggaccccagcagccgcaactgcagcccgcccaccaccttcttgctgttcagccagaaatctgccatcagtcggatgatcccggacgaccagcacagcccggatctcatcctgcccctgcatggactgaggaacgtcaaagccatcgactatgacccactggacaagttcatctactgggtggatgggcgccagaacatcaagcgagccaaggacgacgggacccagccctttgttttgacctctctgagccaaggccaaaacccagacaggcagccccacgacctcagcatcgacatctacagccggacactgttctggacgtgcgaggccaccaataccatcaacgtccacaggctgagcggggaagccatgggggtggtgctgcgtggggaccgcgacaagcccagggccatcgtcgtcaacgcggagcgagggtacctgtacttcaccaacatgcaggaccgggcagccaagatcgaacgcgcagccctggacggcaccgagcgcgaggtcctcttcaccaccggcctcatccgccctgtggccctggtggtagacaacacactgggcaagctgttctgggtggacgcggacctgaagcgcattgagagctgtgacctgtcaggggccaaccgcctgaccctggaggacgccaacatcgtgcagcctctgggcctgaccatccttggcaagcatctctactggatcgaccgccagcagcagatgatcgagcgtgtggagaagaccaccggggacaagcggactcgcatccagggccgtgtcgcccacctcactggcatccatgcagtggaggaagtcagcctggaggagttctcagcccacccatgtgcccgtgacaatggtggctgctcccacatctgtattgccaagggtgatgggacaccacggtgctcatgcccagtccacctcgtgctcctgcagaacctgctgacctgtggagagccgcccacctgctccccggaccagtttgcatgtgccacaggggagatcgactgtatccccggggcctggcgctgtgacggctttcccgagtgcgatgaccagagcgacgaggagggctgccccgtgtgctccgccgcccagttcccctgcgcgcggggtcagtgtgtggacctgcgcctgcgctgcgacggcgaggcagactgtcaggaccgctcagacgaggcggactgtgacgccatctgcctgcccaaccagttccggtgtgcgagcggccagtgtgtcctcatcaaacagcagtgcgactccttccccgactgtatcgacggctccgacgagctcatgtgtgaaatcaccaagccgccctcagacgacagcccggcccacagcagtgccatcgggcccgtcattggcatcatcctctctctcttcgtcatgggtggtgtctattttgtgtgccagcgcgtggtgtgccagcgctatgcgggggccaacgggcccttcccgcacgagtatgtcagcgggaccccgcacgtgcccctcaatttcatagccccgggcggttcccagcatggccccttcacaggcatcgcatgcggaaagtccatgatgagctccgtgagcctgatggggggccggggcggggtgcccctctacgaccggaaccacgtcacaggggcctcgtccagcagctcgtccagcacgaaggccacgctgtacccgccgatcctgaacccgccgccctccccggccacggacccctccctgtacaacatggacatgttctactcttcaaacattccggccactgcgagaccgtacaggccctacatcattcgaggaatggcgcccccgacgacgccctgcagcaccgacgtgtgtgacagcgactacagcgccagccgctggaaggccagcaagtactacctggatttgaactcggactcagacccctatccacccccacccacgccccacagccagtacctgtcggcggaggacagctgcccgccctcgcccgccaccgagaggagctacttccatctcttcccgccccctccgtccccctgcacggactcatcctgacctcggccgggccactctggcttctctgtgcccctgtaaatagttttaaatatgaacaaagaaaaaaatatattttatgatttaaaaaataaatataattgggattttaaaaacatgagaaatgtgaactgtgatggggtgggcagggctgggagaactttgtacagtggagaaatatttataaacttaattttgtaaaacagaaaaaaaaaaaaaaaaaaaaaaaaaaaaaaaaaaaaaaaaaaaaaaaaaaaaaaaaaaaaaaaaaaaaaaaaaaaaaaaaaaaaaaaaaaaaaaaaaaaaaaaaaaaaaaaaaaaaaaaagcggccgc

SEQ ID NO: 761 - protein, 1615 aa, Homo sapiens
MEAAPPGPPWPLLLLLLLLLALCGCPAPAAASPLLLFANRRDVRLVDAGGVKLESTIVVSGLEDAAAVDFQFSKGAVYWTDVSEEAIKQTYLNQTGAAVQNVVISGLVSPDGLACDWVGKKLYWTDSETNRIEVANLNGTSRKVLFWQDLDQPRAIALDPAHGYMYWTDWGETPRIERAGMDGSTRKIIVDSDIYWPNGLTIDLEEQKLYWADAKLSFIHRANLDGSFRQKVVEGSLTHPFALTLSGDTLYWTDWQTRSIHACNKRTGGKRKEILSALYSPMDIQVLSQERQPFFHTRCEEDNGGCSHLCLLSPSEPFYTCACPTGVQLQDNGRTCKAGAEEVLLLARRTDLRRISLDTPDFTDIVLQVDDIRHAIAIDYDPLEGYVYWTDDEVRAIRRAYLDGSGAQTLVNTEINDPDGIAVDWVARNLYWTDTGTDRIEVTRLNGTSRKILVSEDLDEPRAIALHPVMGLMYWTDWGENPKIECANLDGQERRVLVNASLGWPNGLALDLQEGKLYWGDAKTDKIEVINVDGTKRRTLLEDKLPHIFGFTLLGDFIYWTDWQRRSIERVHKVKASRDVIIDQLPDLMGLKAVNVAKVVGTNPCADRNGGCSHLCFFTPHATRCGCPIGLELLSDMKTCIVPEAFLVFTSRAAIHRISLETNNNDVAIPLTGVKEASALDFDVSNNHIYWTDVSLKTISRAFMNGSSVEHVVEFGLDYPEGMAVDWMGKNLYWADTGTNRIEVARLDGQFRQVLVWRDLDNPRSLALDPTKGYIYWTEWGGKPRIVRAFMDGTNCMTLVDKVGRANDLTIDYADQRLYWTDLDTNMIESSNMLGQERVVIADDLPHPFGLTQYSDYIYWTDWNLHSIERADKTSGRNRTLIQGHLDFVMDILVFHSSRQDGLNDCMHNNGQCGQLCLAIPGGHRCGCASHYTLDPSSRNCSPPTTFLLFSQKSAISRMIPDDQHSPDLILPLHGLRNVKAIDYDPLDKFIYWVDGRQNIKRAKDDGTQPFVLTSLSQGQNPDRQPHDLSIDIYSRTLFWTCEATNTINVHRLSGEAMGVVLRGDRDKPRAIVVNAERGYLYFTNMQDRAAKIERAALDGTEREVLFTTGLIRPVALVVDNTLGKLFWVDADLKRIESCDLSGANRLTLEDANIVQPLGLTILGKHLYWIDRQQQMIERVEKTTGDKRTRIQGRVAHLTGIHAVEEVSLEEFSAHPCARDNGGCSHICIAKGDGTPRCSCPVHLVLLQNLLTCGEPPTCSPDQFACATGEIDCIPGAWRCDGFPECDDQSDEEGCPVCSAAQFPCARGQCVDLRLRCDGEADCQDRSDEADCDAICLPNQFRCASGQCVLIKQQCDSFPDCIDGSDELMCEITKPPSDDSPAHSSAIGPVIGIILSLFVMGGVYFVCQRVVCQRYAGANGPFPHEYVSGTPHVPLNFIAPGGSQHGPFTGIACGKSMMSSVSLMGGRGGVPLYDRNHVTGASSSSSSSTKATLYPPILNPPPSPATDPSLYNMDMFYSSNIPATARPYRPYIIRGMAPPTTPCSTDVCDSDYSASRWKASKYYLDLNSDSDPYPPPPTPHSQYLSAEDSCPPSPATERSYFHLFPPPPSPCTDSS

SEQ ID NO: 762 - protein, 1564 aa, Mouse
METAPTRAPPPPPPPLLLLVLYCSLVPAAASPLLLFANRRDVRLVDAGGVKLESTIVASGLEDAAAVDFQFSKGAVYWTDVSEEAIKQTYLNQTGAAAQNIVISGLVSPDGLACDWVGKKLYWTDSETNRIEVANLNGTSRKVLFWQDLDQPRAIALDPAHGYMYWTDWGEAPRIERAGMDGSTRKIIVDSDIYWPNGLTIDLEEQKLYWADAKLSFIHRANLDGSFRQKVVEGSLTHPFALTLSGDTLYWTDWQTRSIHACNKWTGEQRKEILSALYSPMDIQVLSQERQPPFHTPCEEDNGGCSHLCLLSPREPFYSCACPTGVQLQDNGKTCKTGAEEVLLLARRTDLRRISLDTPDFTDIVLQVGDIRHAIAIDYDPLEGYVYWTDDEVRAIRRAYLDGSGAQTLVNTEINDPDGIAVDWVARNLYWTDTGTDRIEVTRLNGTSRKILVSEDLDEPRAIVLHPVMGLMYWTDWGENPKIECANLDGRDRHVLVNTSLGWPNGLALDLQEGKLYWGDAKTDKIEVINIDGTKRKTLLEDKLPHIFGFTLLGDFIYWTDWQRRSIERVHKVKASRDVIIDQLPDLMGLKAVNVAKVVGTNPCADGNGGCSHLCFFTPRATKCGCPIGLELLSDMKTCIIPEAFLVFTSRATIHRISLETNNNDVAIPLTGVKEASALDFDVSNNHIYWTDVSLKTISRAFMNGSSVEHVIEFGLDYPEGMAVDWMGKNLYWADTGTNRIEVARLDGQFRQVLVWRDLDNPRSLALDPTKGYIYWTEWGGKPRIVRAFMDGTNCMTLVDKVGRANDLTIDYADQRLYWTDLDTNMIESSNMLGQERMVIADDLPYPFGLTQYSDYIYWTDWNLHSIERADKTSGRNRTLIQGHLDFVMDILVFHSSRQDGLNDCVHSNGQCGQLCLAIPGGHRCGCASHYTLDPSSRNCSPPSTFLLFSQKFAISRMIPDDQLSPDLVLPLHGLRNVKAINYDPLDKFIYWVDGRQNIKRAKDDGTQPSMLTSPSQSLSPDRQPHDLSIDIYSRTLFWTCEATNTINVHRLDGDAMGVVLRGDRDKPRAIAVNAERGYMYFTNMQDHAAKIERASLDGTEREVLFTTGLIRPVALVVDNALGKLFWVDADLKRIESCDLSGANRLTLEDANIVQPVGLTVLGRHLYWIDRQQQMIERVEKTTGDKRTRVQGRVTHLTGIHAVEEVSLEEFSAHPCARDNGGCSHICIAKGDGTPRCSCPVHLVLLQNLLTCGEPPTCSPDQFACTTGEIDCIPGAWRCDGFPECADQSDEEGCPVCSASQFPCARGQCVDLRLRCDGEADCQDRSDEANCDAVCLPNQFRCTSGLFVMGGVYFVCQRVMCQRYTGASGPFPHEYVGGAPHVPLNFIAPGGSQHGPFPGIPCSKSVMSSMSLVGGRGSVPLYDRNHVTGASSSSSSSTKATLYPPILNPPPSPATDPSLYNVDVFYSSGIPATARPYRPYVIRGMAPPTTPCSTDVCDSDYSISRWKSSKYYLDLNSDSDPYPPPPTPHSQYLSAEDSCPPSPGTERSYCHLFPPPPSPCTDSS

SEQ ID NO: 763 - protein, 1665 aa, Homo sapiens
MEAAPPGPPWPLLLLLLLLLALCGCPAPAAASPLLLFANRRDVRLVDAGGVKLESTIVVSGLEDAAAVDFQFSKGAVYWTDVSEEAIKQTYLNQTGAAVQNVVISGLVSPDGLACDWVGKKLYWTDSETNRIEVANLNGTSRKVLFWQDLDQPRAIALDPAHGYMYWTDWGETPRIERAGMDGSTRKIIVDSDIYWPNGLTIDLEEQKLYWADAKLSFIHRANLDGSFRQKVVEGSLTHPFALTLSGDTLYWTDWQTRSIHACNKRTGGKRKEILSALYSPMDIQVLSQERQPFFHTRCEEDNGGCSHLCLLSPSEPFYTCACPTGVQLQDNGRTCKAGAEEVLLLARRTDLRRISLDTPDFTDIVLQVDDIRHAIAIDYDPLEGYVYWTDDEVRAIRRAYLDGSGAQTLVNTEINDPDGIAVDWVARNLYWTDTGTDRIEVTRLNGTSRKILVSEDLDEPRAIALHPVMGLMYWTDWGENPKIECANLDGQERRVLVNASLGWPNGLALDLQEGKLYWGDAKTDKIEVINVDGTKRRTLLEDKLPHIFGFTLLGDFIYWTDWQRRSIERVHKVKASRDVIIDQLPDLMGLKAVNVAKVVGTNPCADRNGGCSHLCFFTPHATRCGCPIGLELLSDMKTCIVPEAFLVFTSRAAIHRISLETNNNDVAIPLTGVKEASALDFDVSNNHIYWTDVSLKTISRAFMNGSSVEHVVEFGLDYPEGMAVDWMGKNLYWADTGTNRIEVARLDGQFRQVLVWRDLDNPRSLALDPTKGYIYWTEWGGKPRIVRAFMDGTNCMTLVDKVGRANDLTIDYADQRLYWTDLDTNMIESSNMLGQERVVIADDLPHPFGLTQYSDYIYWTDWNLHSIERADKTSGRNRTLIQGHLDFVMDILVFHSSRQDGLNDCMHNNGQCGQLCLAIPGGHRCGCASHYTLDPSSRNCSPPTTFLLFSQKSAISRMIPDDQHSPDLILPLHGLRNVKAIDYDPLDKFIYWVDGRQNFSQKSAINRMVIDEQQSPDIILPIHSLRNVRAIDYDPLDKQLYWIDSRQNIKRAKDDGTQPFVLTSLSQGQNPDRQPHDLSIDIYSRTLFWTCEATNTINVHRLSGEAMGVVLRGDRDKPRAIVVNAERGYLYFTNMQDRAAKIERAALDGTEREVLFTTGLIRPVALVVDNTLGKLFWVDADLKRIESCDLSGANRLTLEDANIVQPLGLTILGKHLYWIDRQQQMIERVEKTTGDKRTRIQGRVAHLTGIHAVEEVSLEEFSAHPCARDNGGCSHICIAKGDGTPRCSCPVHLVLLQNLLTCGEPPTCSPDQFACATGEIDCIPGAWRCDGFPECDDQSDEEGCPVCSAAQFPCARGQCVDLRLRCDGEADCQDRSDEADCDAICLPNQFRCASGQCVLIKQQCDSFPDCIDGSDELMCEITKPPSDDSPAHSSAIGPVIGIILSLFVMGGVYFVCQRVVCQRYAGANGPFPHEYVSGTPHVPLNFIAPGGSQHGPFTGIACGKSMMSSVSLMGGRGGVPLYDRNHVTGASSSSSSSTKATLYPPILNPPPSPATDPSLYNMDMFYSSNIPATARPYRPYIIRGMAPPTTPCSTDVCDSDYSASRWKASKYYLDLNSDSDPYPPPPTPHSQYLSAEDSCPPSPATERSYFHLFPPPPSPCTDSS

SEQ ID NO: 764 - protein, 1613 aa, Homo sapiens
MGAVLRSLLACSFCVLLRAAPLLLYANRRDLRLVDATNGKENATIVVGGLEDAAAVDFVFSHGLIYWSDVSEEAIKRTEFNKTESVQNVVVSGLLSPDGLACDWLGEKLYWTDSETNRIEVSNLDGSLRKVLFWQELDQPRAIALDPSSGFMYWTDWGEVPKIERAGMDGSSRFIIINSEIYWPNGLTLDYEEQKLYWADAKLNFIHKSNLDGTNRQAVVKGSLPHPFALTLFEDILYWTDWSTHSILACNKYTGEGLREIHSDIFSPMDIHAFSQQRQPNATNPCGIDNGGCSHLCLMSPVKPFYQCACPTGVKLLENGKTCKDGATELLLLARRTDLRRISLDTPDFTDIVLQLEDIRHAIAIDYDPVEGYIYWTDDEVRAIRRSFIDGSGSQFVVTAQIAHPDGIAVDWVARNLYWTDTGTDRIEVTRLNGTMRKILISEDLEEPRAIVLDPMVGYMYWTDWGEIPKIERAALDGSDRVVLVNTSLGWPNGLALDYDEGKIYWGDAKTDKIEVMNTDGTGRRVLVEDKIPHIFGFTLLGDYVYWTDWQRRSIERVHKRSAEREVIIDQLPDLMGLKATNVHRVIGSNPCAEENGGCSHLCLYRPQGLRCACPIGFELISDMKTCIVPEAFLLFSRRADIRRISLETNNNNVAIPLTGVKEASALDFDVTDNRIYWTDISLKTISRAFMNGSALEHVVEFGLDYPEGMAVDWLGKNLYWADTGTNRIEVSKLDGQHRQVLVWKDLDSPRALALDPAEGFMYWTEWGGKPKIDRAAMDGSERTTLVPNVGRANGLTIDYAKRRLYWTDLDTNLIESSNMLGLNREVIADDLPHPFGLTQYQDYIYWTDWSRRSIERANKTSGQNRTIIQGHLDYVMDILVFHSSRQSGWNECASSNGHCSHLCLAVPVGGFVCGCPAHYSLNADNRTCSAPTTFLLFSQKSAINRMVIDEQQSPDIILPIHSLRNVRAIDYDPLDKQLYWIDSRQNMIRKAQEDGSQGFTVVVSSVPSQNLEIQPYDLSIDIYSRYIYWTCEATNVINVTRLDGRSVGVVLKGEQDRPRAIVVNPEKGYMYFTNLQERSPKIERAALDGTEREVLFFSGLSKPIALALDSRLGKLFWADSDLRRIESSDLSGANRIVLEDSNILQPVGLTVFENWLYWIDKQQQMIEKIDMTGREGRTKVQARIAQLSDIHAVKELNLQEYRQHPCAQDNGGCSHICLVKGDGTTRCSCPMHLVLLQDELSCGEPPTCSPQQFTCFTGEIDCIPVAWRCDGFTECEDHSDELNCPVCSESQFQCASGQCIDGALRCNGDANCQDKSDEKNCEVLCLIDQFRCANGQCIGKHKKCDHNVDCSDKSDELDCYPTEEPAPQATNTVGSVIGVIVTIFVSGTVYFICQRMLCPRMKGDGETMTNDYVVHGPASVPLGYVPHPSSLSGSLPGMSRGKSMISSLSIMGGSSGPPYDRAHVTGASSSSSSSTKGTYFPAILNPPPSPATERSHYTMEFGYSSNSPSTHRSYSYRPYSYRHFAPPTTPCSTDVCDSDYAPSRRMTSVATAKGYTSDLNYDSEPVPPPPTPRSQYLSAEENYESCPPSPYTERSYSHHLYPPPPSPCTDSS

SEQ ID NO: 765 - protein, 207 aa, Artificial Sequence
  cytoplasmic domain and portion of transmembrane domain
RVVCQRYAGANGPFPHEYVSGTPHVPLNFIAPGGSQHGPFTGIACGKSMMSSVSLMGGRGGVPLYDRNHVTGASSSSSSSTKATLYPPILNPPPSPATDPSLYNMDMFYSSNIPATVRPYRPYIIRGMAPPTTPCSTDVCDSDYSASRWKASKYYLDLNSDSDPYPPPPTPHSQYLSAEDSCPPSPATERSYFHLFPPPPSPCTDSS

SEQ ID NO: 766 - protein, 16 aa, Homo sapiens
KLYWADAKLSFIHRAN

SEQ ID NO: 767 - protein, 15 aa, Homo sapiens
ALYSPMDIQVLSQER

SEQ ID NO: 768 - protein, 16 aa, Homo sapiens
GLEDAAAVDFQFSKGA

SEQ ID NO: 769 - protein, 14 aa, Homo sapiens
EGSLTHPFALTLSG

SEQ ID NO: 770 - protein, 16 aa, Homo sapiens
TLYWTDWQTRSIHACN

SEQ ID NO: 771 - protein, 13 aa, Homo sapiens
VLFWQDLDQPRAI

SEQ ID NO: 772 - protein, 17 aa, Homo sapiens
IYWPNGLTIDLEEQKLY

SEQ ID NO: 773 - protein, 14 aa, Homo sapiens
LLLFANRRDVRLVD

SEQ ID NO: 774 - protein, 15 aa, Homo sapiens
GAVYWTDVSEEAIKQ

SEQ ID NO: 775 - protein, 15 aa, Homo sapiens
KLYWTDSETNRIEVA

SEQ ID NO: 776 - DNA, 39 bp, Artificial Sequence
  complementary synthetic oligonucleotide
tggtcagcggcctggaggatgtggccgcagtggacttcc

SEQ ID NO: 777 - DNA, 39 bp, Artificial Sequence
  complementary synthetic oligonucleotide
ggaagtccactgcggccacatcctccaggccgctgacca

SEQ ID NO: 778 - DNA, 40 bp, Artificial Sequence
  complementary synthetic oligonucleotide
aagctgtactggacggactcagtgaccaaccgcatcgagg

SEQ ID NO: 779 - DNA, 40 bp, Artificial Sequence
  complementary synthetic oligonucleotide
cctcgatgcggttggtcactgagtccgtccagtacagctt

SEQ ID NO: 780 - DNA, 41 bp, Artificial Sequence
  complementary synthetic oligonucleotide
atgtactggacagactggaaggagacgccccggattgagcg

SEQ ID NO: 781 - DNA, 41 bp, Artificial Sequence
  complementary synthetic oligonucleotide
cgctcaatccggggcgtctccttccagtctgtccagtacat

SEQ ID NO: 782 - DNA, 41 bp, Artificial Sequence
  complementary synthetic oligonucleotide
atgtactggacagactggtttgagacgccccggattgagcg

SEQ ID NO: 783 - DNA, 41 bp, Artificial Sequence
  complementary synthetic oligonucleotide
cgctcaatccggggcgtctcaaaccagtctgtccagtacat

SEQ ID NO: 784 - DNA, 41 bp, Artificial Sequence
  complementary synthetic oligonucleotide
atgtactggacagactggattgagacgccccggattgagcg

SEQ ID NO: 785 - DNA, 41 bp, Artificial Sequence
  complementary synthetic oligonucleotide
cgctcaatccggggcgtctcaatccagtctgtccagtacat

SEQ ID NO: 786 - DNA, 41 bp, Artificial Sequence
  complementary synthetic oligonucleotide
atgtactggacagactggcaggagacgccccggattgagcg

SEQ ID NO: 787 - DNA, 41 bp, Artificial Sequence
  complementary synthetic oligonucleotide
cgctcaatccggggcgtctcctgccagtctgtccagtacat

SEQ ID NO: 788 - DNA, 42 bp, Artificial Sequence
  complementary synthetic oligonucleotide
cggacatttactggcccaatgtactgaccatcgacctggagg

SEQ ID NO: 789 - DNA, 42 bp, Artificial Sequence
  complementary synthetic oligonucleotide
cctccaggtcgatggtcagtacattgggccagtaaatgtccg

SEQ ID NO: 790 - DNA, 40 bp, Artificial Sequence
  complementary synthetic oligonucleotide
agctctactgggctgacgtcaagctcagcttcatccaccg

SEQ ID NO: 791 - DNA, 40 bp, Artificial Sequence
  complementary synthetic oligonucleotide
cggtggatgaagctgagcttgacgtcagcccagtagagct

SEQ ID NO: 792 - DNA, 41 bp, Artificial Sequence
  complementary synthetic oligonucleotide
gagtgccctctactcacccgtggacatccaggtgctgagcc

SEQ ID NO: 793 - DNA, 41 bp, Artificial Sequence
  complementary synthetic oligonucleotide
ggctcagcacctggatgtccacgggtgagtagagggcactc

SEQ ID NO: 794 - DNA, 45 bp, Artificial Sequence
  complementary synthetic oligonucleotide
catgtactggacagactgggtagagaaccctaaaatcgagtgtgc

SEQ ID NO: 795 - DNA, 45 bp, Artificial Sequence
  complementary synthetic oligonucleotide
gcacactcgattttagggttctctacccagtctgtccagtacatg

SEQ ID NO: 796 - DNA, 42 bp, Artificial Sequence
  complementary synthetic oligonucleotide
catctactggaccgagtgggtcggcaagccgaggatcgtgcg

SEQ ID NO: 797 - DNA, 42 bp, Artificial Sequence
  complementary synthetic oligonucleotide
cgcacgatcctcggcttgccgacccactcggtccagtagatg

SEQ ID NO: 798 - DNA, 42 bp, Artificial Sequence
  complementary synthetic oligonucleotide
gtacttcaccaacatggtggaccgggcagccaagatcgaacg

SEQ ID NO: 799 - DNA, 42 bp, Artificial Sequence
  complementary synthetic oligonucleotide
cgttcgatcttggctgcccggtccaccatgttggtgaagtac

SEQ ID NO: 800 - DNA, 42 bp, Artificial Sequence
  complementary synthetic oligonucleotide
gtactggacagactgggtagaagtgccaaagatagaacgtgc

SEQ ID NO: 801 - DNA, 42 bp, Artificial Sequence
  complementary synthetic oligonucleotide
gcacgttctatctttggcacttctacccagtctgtccagtac

SEQ ID NO: 802 - DNA, 13 bp, Artificial Sequence
  mutation in the Exons of LRP5
cgaggaggccatc

SEQ ID NO: 803 - DNA, 10 bp, Artificial Sequence
  mutation in the Exons of LRP5
agacctacct

SEQ ID NO: 804 - DNA, 10 bp, Artificial Sequence
  mutation in the Exons of LRP5
gtgagacgcc

SEQ ID NO: 805 - DNA, 14 bp, Artificial Sequence
  mutation in the Exons of LRP5
cgtacctggacggg

SEQ ID NO: 806 - DNA, 14 bp, Artificial Sequence
  mutation in the Exons of LRP5
cgggttcacgctgc

SEQ ID NO: 807 - DNA, 14 bp, Artificial Sequence
  mutation in the Exons of LRP5
ggccttcttggtct

SEQ ID NO: 808 - DNA, 14 bp, Artificial Sequence
  mutation in the Exons of LRP5
gtggccatcccgct

SEQ ID NO: 809 - DNA, 13 bp, Artificial Sequence
  mutation in the Exons of LRP5
cagaatcgaagtg

SEQ ID NO: 810 - DNA, 10 bp, Artificial Sequence
  mutation in the Exons of LRP5
ggacactgtt

SEQ ID NO: 811 - DNA, 12 bp, Artificial Sequence
  mutation in the Exons of LRP5
cggcaccgagcg

SEQ ID NO: 812 - DNA, 13 bp, Artificial Sequence
  mutation in the Exons of LRP5
agacaacacactg

SEQ ID NO: 813 - DNA, 10 bp, Artificial Sequence
  mutation in the Exons of LRP5
gactcgcatc

SEQ ID NO: 814 - DNA, 10 bp, Artificial Sequence
  mutation in the Exons of LRP5
cggactgtga

SEQ ID NO: 815 - DNA, 13 bp, Artificial Sequence
  mutation in the Exons of LRP5
cagcccggcccac

SEQ ID NO: 816 - DNA, 12 bp, Artificial Sequence
  mutation in the Exons of LRP5
gggggccaacgg

SEQ ID NO: 817 - DNA, 10 bp, Artificial Sequence
  mutation in the Exons of LRP5
cggccactgc

SEQ ID NO: 818 - DNA, 14 bp, Artificial Sequence
  mutation in the Exons of LRP5
cgacgtgtgtgaca

SEQ ID NO: 819 - DNA, 14 bp, Artificial Sequence
  mutation in the Introns of LRP5
ctctctctcgaatt

SEQ ID NO: 820 - DNA, 14 bp, Artificial Sequence
  mutation in the Introns of LRP5
tcagtccacactcg

SEQ ID NO: 821 - DNA, 14 bp, Artificial Sequence
  mutation in the Introns of LRP5
gggcgggggctggg

SEQ ID NO: 822 - DNA, 13 bp, Artificial Sequence
  mutation in the Introns of LRP5
gcagagaccagac

SEQ ID NO: 823 - DNA, 14 bp, Artificial Sequence
  mutation in the Introns of LRP5
tgctcttgggcatt

SEQ ID NO: 824 - DNA, 14 bp, Artificial Sequence
  mutation in the Introns of LRP5
tgggggtgagtcct

SEQ ID NO: 825 - DNA, 14 bp, Artificial Sequence
  mutation in the Introns of LRP5
tgtttgcctgtccc

SEQ ID NO: 826 - DNA, 13 bp, Artificial Sequence
  mutation in the Introns of LRP5
atgtgtgtggcag

SEQ ID NO: 827 - DNA, 13 bp, Artificial Sequence
  mutation in the Introns of LRP5
ggtctcgcccttc

SEQ ID NO: 828 - DNA, 14 bp, Artificial Sequence
  mutation in the Introns of LRP5
cggtgagagcagac

SEQ ID NO: 829 - DNA, 13 bp, Artificial Sequence
  mutation in the Introns of LRP5
cggggcagccggg

SEQ ID NO: 830 - DNA, 14 bp, Artificial Sequence
  mutation in the Introns of LRP5
gtaccctgtggcct

SEQ ID NO: 831 - DNA, 14 bp, Artificial Sequence
  mutation in the Introns of LRP5
ctcatctggggttc

SEQ ID NO: 832 - DNA, 14 bp, Artificial Sequence
  mutation in the Introns of LRP5
atgatgctacctgg

SEQ ID NO: 833 - DNA, 14 bp, Artificial Sequence
  mutation in the Introns of LRP5
cgggaatttggaga

SEQ ID NO: 834 - DNA, 14 bp, Artificial Sequence
  mutation in the Introns of LRP5
ttgttcaactagta

SEQ ID NO: 835 - DNA, 13 bp, Artificial Sequence
  mutation in the Introns of LRP5
tccgaggagacgc

SEQ ID NO: 836 - DNA, 14 bp, Artificial Sequence
  mutation in the Introns of LRP5
ttgtttccggcatc

SEQ ID NO: 837 - DNA, 13 bp, Artificial Sequence
  mutation in the Introns of LRP5
catttggccccta

SEQ ID NO: 838 - DNA, 10 bp, Artificial Sequence
  mutation in the Introns of LRP5
gcccagtcac

SEQ ID NO: 839 - DNA, 10 bp, Artificial Sequence
  mutation in the Introns of LRP5
cgccattgcc

SEQ ID NO: 840 - DNA, 10 bp, Artificial Sequence
  mutation in the Introns of LRP5
gtgtgatgtt

SEQ ID NO: 841 - DNA, 14 bp, Artificial Sequence
  mutation in the Introns of LRP5
tgatctggaggagg

SEQ ID NO: 842 - DNA, 14 bp, Artificial Sequence
  mutation in the Introns of LRP5
gtctgggcagcttt

SEQ ID NO: 843 - DNA, 13 bp, Artificial Sequence
  mutation in the Introns of LRP5
caccgtcagtgct

SEQ ID NO: 844 - DNA, 10 bp, Artificial Sequence
  mutation in the Introns of LRP5
ggcacctgcc

SEQ ID NO: 845 - DNA, 18 bp, Artificial Sequence
  primer
tgtaaaacgacggccagt

SEQ ID NO: 846 - DNA, 19 bp, Artificial Sequence
  primer
aggaaacagctatgaccat

SEQ ID NO: 847 - DNA, 18 bp, Artificial Sequence
  primer
gagacgcggcgcggcttc

SEQ ID NO: 848 - DNA, 20 bp, Artificial Sequence
  primer
cgccccaactcgctcccaac

SEQ ID NO: 849 - DNA, 17 bp, Artificial Sequence
  primer
tcccgcgcgcccagctc

SEQ ID NO: 850 - DNA, 17 bp, Artificial Sequence
  primer
tcgccaagtcgcttccg

SEQ ID NO: 851 - DNA, 18 bp, Artificial Sequence
  primer
aaggaactggaggtcttg

SEQ ID NO: 852 - DNA, 19 bp, Artificial Sequence
  primer
cagagtcacaccctttttc

SEQ ID NO: 853 - DNA, 17 bp, Artificial Sequence
  primer
ggcatgggcagggcagt

SEQ ID NO: 854 - DNA, 19 bp, Artificial Sequence
  primer
tgaaaaacaacttgggctc

SEQ ID NO: 855 - DNA, 18 bp, Artificial Sequence
  primer
ccaagttctgagaagtcc

SEQ ID NO: 856 - DNA, 20 bp, Artificial Sequence
  primer
aatacctgaaaccatacctg

SEQ ID NO: 857 - DNA, 17 bp, Artificial Sequence
  primer
tgcattcctcagggccc

SEQ ID NO: 858 - DNA, 18 bp, Artificial Sequence
  primer
ttggttatttccgatggg

SEQ ID NO: 859 - DNA, 20 bp, Artificial Sequence
  primer
ggcgtagtggtgggcatcag

SEQ ID NO: 860 - DNA, 20 bp, Artificial Sequence
  primer
cccagccagccacacacctc

SEQ ID NO: 861 - DNA, 17 bp, Artificial Sequence
  primer
actgtcgggggaccctc

SEQ ID NO: 862 - DNA, 17 bp, Artificial Sequence
  primer
attgcagcaggtacccc

SEQ ID NO: 863 - DNA, 20 bp, Artificial Sequence
  primer
gggaaattgcaggccgtctg

SEQ ID NO: 864 - DNA, 20 bp, Artificial Sequence
  primer
ctgaggaccaaggcggagag

SEQ ID NO: 865 - DNA, 17 bp, Artificial Sequence
  primer
aggctgagggccccatg

SEQ ID NO: 866 - DNA, 17 bp, Artificial Sequence
  primer
caggattgacctcctgg

SEQ ID NO: 867 - DNA, 18 bp, Artificial Sequence
  primer
cacctaacatcaccagcc

SEQ ID NO: 868 - DNA, 18 bp, Artificial Sequence
  primer
gatgcaagacagtgtccc

SEQ ID NO: 869 - DNA, 17 bp, Artificial Sequence
  primer
cctggctgagtatttcc

SEQ ID NO: 870 - DNA, 17 bp, Artificial Sequence
  primer
tcaatctccctctcgcc

SEQ ID NO: 871 - DNA, 20 bp, Artificial Sequence
  primer
acaccgacatttacgagcac

SEQ ID NO: 872 - DNA, 20 bp, Artificial Sequence
  primer
aaatagcagagcacaggcac

SEQ ID NO: 873 - DNA, 18 bp, Artificial Sequence
  primer
cgacatttactgacacca

SEQ ID NO: 874 - DNA, 17 bp, Artificial Sequence
  primer
ccatcggtgcctcgcca

SEQ ID NO: 875 - DNA, 25 bp, Artificial Sequence
  primer
tctcaaacaaacaaacaaacaaaaa

SEQ ID NO: 876 - DNA, 21 bp, Artificial Sequence
  primer
tccttggccagatactgtcac

SEQ ID NO: 877 - DNA, 19 bp, Artificial Sequence
  primer
acaaacaaacaaagcgtca

SEQ ID NO: 878 - DNA, 17 bp, Artificial Sequence
  primer
ctttcctgtcctgccct

SEQ ID NO: 879 - DNA, 18 bp, Artificial Sequence
  primer
tgtgtggcgggaataaag

SEQ ID NO: 880 - DNA, 18 bp, Artificial Sequence
  primer
ttgaggcaggaacagagg

SEQ ID NO: 881 - DNA, 17 bp, Artificial Sequence
  primer
ctgtgcacattggagct

SEQ ID NO: 882 - DNA, 19 bp, Artificial Sequence
  primer
caaggttttcccataaagg

SEQ ID NO: 883 - DNA, 19 bp, Artificial Sequence
  primer
atgtctacaaaacacgctg

SEQ ID NO: 884 - DNA, 18 bp, Artificial Sequence
  primer
ctaatcactgagggccac

SEQ ID NO: 885 - DNA, 17 bp, Artificial Sequence
  primer
gttctggcctggcgtgg

SEQ ID NO: 886 - DNA, 17 bp, Artificial Sequence
  primer
acggacagcctgccacc

SEQ ID NO: 887 - DNA, 18 bp, Artificial Sequence
  primer
tcaccttacgagtgagcc

SEQ ID NO: 888 - DNA, 18 bp, Artificial Sequence
  primer
agcctctcccgacataac

SEQ ID NO: 889 - DNA, 18 bp, Artificial Sequence
  primer
actgttgggaattcaggg

SEQ ID NO: 890 - DNA, 17 bp, Artificial Sequence
  primer
tgcagcaaaggcaccca

SEQ ID NO: 891 - DNA, 18 bp, Artificial Sequence
  primer
gaaaaccagcaaaagccc

SEQ ID NO: 892 - DNA, 19 bp, Artificial Sequence
  primer
tgtccatcacgaagtccag

SEQ ID NO: 893 - DNA, 17 bp, Artificial Sequence
  primer
atgagggcggccatgtg

SEQ ID NO: 894 - DNA, 17 bp, Artificial Sequence
  primer
gcggttccggccgctag

SEQ ID NO: 895 - DNA, 22 bp, Artificial Sequence
  primer
acagcgattatatctactggac

SEQ ID NO: 896 - DNA, 18 bp, Artificial Sequence
  primer
atggaaagcactcagcac

SEQ ID NO: 897 - DNA, 18 bp, Artificial Sequence
  primer
agactggaatctgcacag

SEQ ID NO: 898 - DNA, 17 bp, Artificial Sequence
  primer
tgtgctggcagtatgag

SEQ ID NO: 899 - DNA, 21 bp, Artificial Sequence
  primer
agaatgaaattccccatagcg

SEQ ID NO: 900 - DNA, 21 bp, Artificial Sequence
  primer
agacaaaagtcctgtggggtc

SEQ ID NO: 901 - DNA, 17 bp, Artificial Sequence
  primer
tcccgtggacctccagc

SEQ ID NO: 902 - DNA, 17 bp, Artificial Sequence
  primer
acaacggggaaacccag

SEQ ID NO: 903 - DNA, 21 bp, Artificial Sequence
  primer
gagagacccccacaccaatac

SEQ ID NO: 904 - DNA, 20 bp, Artificial Sequence
  primer
caggtggaaagtctccccag

SEQ ID NO: 905 - DNA, 18 bp, Artificial Sequence
  primer
tgggatttgactttcagg

SEQ ID NO: 906 - DNA, 17 bp, Artificial Sequence
  primer
cctgtgagaggctggca

SEQ ID NO: 907 - DNA, 21 bp, Artificial Sequence
  primer
cagttggatttagggcctacc

SEQ ID NO: 908 - DNA, 21 bp, Artificial Sequence
  primer
cagctgtcagtgtgaggacaa

SEQ ID NO: 909 - DNA, 17 bp, Artificial Sequence
  primer
ctcacccattgtggtcg

SEQ ID NO: 910 - DNA, 18 bp, Artificial Sequence
  primer
aacacgctacacacaaag

SEQ ID NO: 911 - DNA, 19 bp, Artificial Sequence
  primer
aactgatggccttcatccc

SEQ ID NO: 912 - DNA, 21 bp, Artificial Sequence
  primer
tcttaaaacgctgttcgtggt

SEQ ID NO: 913 - DNA, 17 bp, Artificial Sequence
  primer
gagcccagcccaggtgg

SEQ ID NO: 914 - DNA, 20 bp, Artificial Sequence
  primer
gatttgttctgcggcaaaag

SEQ ID NO: 915 - DNA, 21 bp, Artificial Sequence
  primer
agactgatggtatgggcacag

SEQ ID NO: 916 - DNA, 21 bp, Artificial Sequence
  primer
atttgtgagatgcaggaaacg

SEQ ID NO: 917 - DNA, 17 bp, Artificial Sequence
  primer
tagagactggtgcagac

SEQ ID NO: 918 - DNA, 20 bp, Artificial Sequence
  primer
cagtacttagaggaaaattc

SEQ ID NO: 919 - DNA, 21 bp, Artificial Sequence
  primer
attctcccagcctctcttctg

SEQ ID NO: 920 - DNA, 21 bp, Artificial Sequence
  primer
gcaggaaggtgagatagaccc

SEQ ID NO: 921 - DNA, 17 bp, Artificial Sequence
  primer
ggttggggctggaggtg

SEQ ID NO: 922 - DNA, 18 bp, Artificial Sequence
  primer
tcacagtctgccttcaag

SEQ ID NO: 923 - DNA, 21 bp, Artificial Sequence
  primer
ggggtctgttactccttgcat

SEQ ID NO: 924 - DNA, 21 bp, Artificial Sequence
  primer
cagctcacagtctgtcctcct

SEQ ID NO: 925 - DNA, 17 bp, Artificial Sequence
  primer
ggcgtagacctccccac

SEQ ID NO: 926 - DNA, 17 bp, Artificial Sequence
  primer
ccgctgccctgggaaag

SEQ ID NO: 927 - DNA, 19 bp, Artificial Sequence
  primer
acgttaccctgaggttggc

SEQ ID NO: 928 - DNA, 21 bp, Artificial Sequence
  primer
aggcctctgtgttgaaggatt

SEQ ID NO: 929 - DNA, 17 bp, Artificial Sequence
  primer
aggctccccaggcctag

SEQ ID NO: 930 - DNA, 17 bp, Artificial Sequence
  primer
ctgatgccaagcacagg

SEQ ID NO: 931 - DNA, 21 bp, Artificial Sequence
  primer
ttggaggaggtaccatgtgtc

SEQ ID NO: 932 - DNA, 21 bp, Artificial Sequence
  primer
ggtggatttgggtgagatttt

SEQ ID NO: 933 - DNA, 18 bp, Artificial Sequence
  primer
tcccgtttcacagatgag

SEQ ID NO: 934 - DNA, 19 bp, Artificial Sequence
  primer
cagattatccacaatcaac

SEQ ID NO: 935 - DNA, 20 bp, Artificial Sequence
  primer
ttctgctgatttctgaaccc

SEQ ID NO: 936 - DNA, 20 bp, Artificial Sequence
  primer
ttgcctttcactgagatgac

SEQ ID NO: 937 - DNA, 17 bp, Artificial Sequence
  primer
aacatgcagtgcccgct

SEQ ID NO: 938 - DNA, 17 bp, Artificial Sequence
  primer
cttcggggcaggtggct

SEQ ID NO: 939 - DNA, 19 bp, Artificial Sequence
  primer
ggcctgcatcttctggagc

SEQ ID NO: 940 - DNA, 18 bp, Artificial Sequence
  primer
cattccctccacggggac

SEQ ID NO: 941 - DNA, 17 bp, Artificial Sequence
  primer
tggccagtggacaggcc

SEQ ID NO: 942 - DNA, 19 bp, Artificial Sequence
  primer
acacaactcaaatgcacac

SEQ ID NO: 943 - protein, 25 aa, Homo sapiens
LILPLHGLRNVKAIDYDPLDKFIYW

SEQ ID NO: 944 - protein, 25 aa, Homo sapiens
KFIYWVDGRQNIKRAKDDGTQPFVL

SEQ ID NO: 945 - protein, 25 aa, Homo sapiens
QPFVLTSLSQGQNPDRQPHDLSIDI

SEQ ID NO: 946 - protein, 25 aa, Homo sapiens
LSIDIYSRTLFWTCEATNTINVHRL

SEQ ID NO: 947 - protein, 25 aa, Homo sapiens
NVHRLSGEAMGVVLRGDRDKPRAIV

SEQ ID NO: 948 - protein, 14 aa, Homo sapiens
CGEPPTCSPDQFAC

SEQ ID NO: 949 - protein, 18 aa, Homo sapiens
WRCDGFPECDDQSDEEGC

SEQ ID NO: 950 - protein, 17 aa, Homo sapiens
RCDGEADCQDRSDEADC

SEQ ID NO: 951 - protein, 14 aa, Homo sapiens
CEITKPPSDDSPAH

SEQ ID NO: 952 - protein, 13 aa, Homo sapiens
MYWTDWVETPRIE

SEQ ID NO: 953 - protein, 13 aa, Homo sapiens
MYWTDWGETPRIE

SEQ ID NO: 954 - protein, 13 aa, Homo sapiens
KRTGGKRKEILSA

SEQ ID NO: 955 - protein, 17 aa, Homo sapiens
ERVEKTTGDKRTRIQGR

SEQ ID NO: 956 - protein, 16 aa, Homo sapiens
KQQCDSFPDCIDGSDE

SEQ ID NO: 957 - protein, 15 aa, Homo sapiens
GNKYQTIDNYQPYPC

SEQ ID NO: 958 - protein, 22 aa, Homo sapiens
LDGYSRRTTLSSKMYHTKGQEG

SEQ ID NO: 959 - protein, 21 aa, Homo sapiens
RIQKDHHQASNSSRLHTCQRH

SEQ ID NO: 960 - protein, 15 aa, Homo sapiens
RGEIEETITESFGND

SEQ ID NO: 961 - protein, 17 aa, Homo sapiens
EIFQRCGEGLSCRIQKD

SEQ ID NO: 962 - DNA, 34 bp, Artificial Sequence
  primer
cagtgaattcaccatgcaaaacaccactttgttc

SEQ ID NO: 963 - DNA, 32 bp, Artificial Sequence
  primer
cagttgcggccgctcatctccggtggcctctg

SEQ ID NO: 964 - DNA, 39 bp, Artificial Sequence
  primer
caatagtcgacgaattcaccatggctctgggcgcagcgg

SEQ ID NO: 965 - DNA, 42 bp, Artificial Sequence
  primer
gtattgcggccgctctagattagtgtctctgacaagtgtgaa

SEQ ID NO: 966 - DNA, 32 bp, Artificial Sequence
  primer
ctaacggatccaccatggccgcgttgatgcgg

SEQ ID NO: 967 - DNA, 33 bp, Artificial Sequence
  primer
gattcgaattctcaaattttctgacacacatgg

SEQ ID NO: 968 - DNA, 40 bp, Artificial Sequence
  receptor variant
gaaggtgctcttctggcaggacggtgaccagccgagggcc

SEQ ID NO: 969 - DNA, 40 bp, Artificial Sequence
  receptor variant
ggccctcggctggtcaccgtcctgccagaagagcaccttc

SEQ ID NO: 970 - DNA, 40 bp, Artificial Sequence
  receptor variant
gatcattgtggactcggacggttactggcccaatggactg

SEQ ID NO: 971 - DNA, 40 bp, Artificial Sequence
  receptor variant
cagtccattgggccagtaaccgtccgagtccacaatgatc

SEQ ID NO: 972 - DNA, 47 bp, Artificial Sequence
  receptor variant
catttactggcccaatggagtgaccatcgacctggaggagcagaagc

SEQ ID NO: 973 - DNA, 47 bp, Artificial Sequence
  receptor variant
gcttctgctcctccaggtcgatggtcactccattgggccagtaaatg

SEQ ID NO: 974 - DNA, 47 bp, Artificial Sequence
  receptor variant
catttactggcccaatggactggtcatcgacctggaggagcagaagc

SEQ ID NO: 975 - DNA, 47 bp, Artificial Sequence
  receptor variant
gcttctgctcctccaggtcgatgaccagtccattgggccagtaaatg

SEQ ID NO: 976 - DNA, 47 bp, Artificial Sequence
  receptor variant
catttactggcccaatggactgaccgtcgacctggaggagcagaagc

SEQ ID NO: 977 - DNA, 47 bp, Artificial Sequence
  receptor variant
gcttctgctcctccaggtcgacggtcagtccattgggccagtaaatg

SEQ ID NO: 978 - DNA, 42 bp, Artificial Sequence
  receptor variant
ggcaagaagctgtactggtcggactcagagaccaaccgcatc

SEQ ID NO: 979 - DNA, 42 bp, Artificial Sequence
  receptor variant
gatgcggttggtctctgagtccgaccagtacagcttcttgcc

SEQ ID NO: 980 - DNA, 42 bp, Artificial Sequence
  receptor variant
ggcaagaagctgtactggggggactcagagaccaaccgcatc

SEQ ID NO: 981 - DNA, 42 bp, Artificial Sequence
  receptor variant
gatgcggttggtctctgagtccccccagtacagcttcttgcc

SEQ ID NO: 982 - DNA, 43 bp, Artificial Sequence
  receptor variant
gaagctgtactggacggacgtagagaccaaccgcatcgaggtg

SEQ ID NO: 983 - DNA, 43 bp, Artificial Sequence
  receptor variant
cacctcgatgcggttggtctctacgtccgtccagtacagcttc

SEQ ID NO: 984 - DNA, 41 bp, Artificial Sequence
  receptor variant
cctgacgcaccccgtcgccctgacgctctccggggacactc

SEQ ID NO: 985 - DNA, 41 bp, Artificial Sequence
  receptor variant
gagtgtccccggagagcgtcagggcgacggggtgcgtcagg

SEQ ID NO: 986 - DNA, 41 bp, Artificial Sequence
  receptor variant
cctgacgcaccccttcgtcctgacgctctccggggacactc

SEQ ID NO: 987 - DNA, 41 bp, Artificial Sequence
  receptor variant
gagtgtccccggagagcgtcaggacgaaggggtgcgtcagg

SEQ ID NO: 988 - DNA, 40 bp, Artificial Sequence
  receptor variant
ctactgggctgacgccgtgctcagcttcatccaccgtgcc

SEQ ID NO: 989 - DNA, 40 bp, Artificial Sequence
  receptor variant
ggcacggtggatgaagctgagcacggcgtcagcccagtag

SEQ ID NO: 990 - DNA, 40 bp, Artificial Sequence
  receptor variant
cttggaccccgctcacggggccatgtactggacagactgg

SEQ ID NO: 991 - DNA, 40 bp, Artificial Sequence
  receptor variant
ccagtctgtccagtacatggccccgtgagcggggtccaag

SEQ ID NO: 992 - DNA, 41 bp, Artificial Sequence
  receptor variant
ggaccccgctcacgggtacgcgtactggacagactggggtg

SEQ ID NO: 993 - DNA, 41 bp, Artificial Sequence
  receptor variant
caccccagtctgtccagtacgcgtacccgtgagcggggtcc

SEQ ID NO: 994 - DNA, 41 bp, Artificial Sequence
  receptor variant
cccgctcacgggtacatggcctggacagactggggtgagac

SEQ ID NO: 995 - DNA, 41 bp, Artificial Sequence
  receptor variant
gtctcaccccagtctgtccaggccatgtacccgtgagcggg

SEQ ID NO: 996 - DNA, 41 bp, Artificial Sequence
  receptor variant
cgctcacgggtacatgtacgcgacagactggggtgagacgc

SEQ ID NO: 997 - DNA, 41 bp, Artificial Sequence
  receptor variant
gcgtctcaccccagtctgtcgcgtacatgtacccgtgagcg

SEQ ID NO: 998 - DNA, 41 bp, Artificial Sequence
  receptor variant
gctcacgggtacatgtactgggcagactggggtgagacgcc

SEQ ID NO: 999 - DNA, 41 bp, Artificial Sequence
  receptor variant
ggcgtctcaccccagtctgcccagtacatgtacccgtgagc

SEQ ID NO: 1000 - DNA, 41 bp, Artificial Sequence
  receptor variant
cacgggtacatgtactggacagcctggggtgagacgccccg

SEQ ID NO: 1001 - DNA, 41 bp, Artificial Sequence
  receptor variant
cggggcgtctcaccccaggctgtccagtacatgtacccgtg

SEQ ID NO: 1002 - DNA, 42 bp, Artificial Sequence
  receptor variant
caacttggatgggcaggagcagcgtgtgctggtcaatgcctc

SEQ ID NO: 1003 - DNA, 42 bp, Artificial Sequence
  receptor variant
gaggcattgaccagcacacgctgctcctgcccatccaagttg

SEQ ID NO: 1004 - DNA, 42 bp, Artificial Sequence
  receptor variant
gcagcgccgcagcatcgagtgggtgcacaaggtcaaggccag

SEQ ID NO: 1005 - DNA, 42 bp, Artificial Sequence
  receptor variant
ctggccttgaccttgtgcacccactcgatgctgcggcgctgc

SEQ ID NO: 1006 - DNA, 41 bp, Artificial Sequence
  receptor variant
cgagaccaataacaacgacatggccatcccgctcacgggcg

SEQ ID NO: 1007 - DNA, 41 bp, Artificial Sequence
  receptor variant
cgcccgtgagcgggatggccatgtcgttgttattggtctcg

SEQ ID NO: 1008 - DNA, 76 bp, Homo sapiens
aagcttgccaccatggagacagacacactcctgctatgggtactgctgctctgggttccaggttccactggtatcc

SEQ ID NO: 1009 - DNA, 485 bp, Homo sapiens
aagcttgccaccatggagacagacacactcctgctatgggtactgctgctctgggttccaggttccactggtgacggatccatgagcgataaaattattcacctgactgacgacagttttgacacggatgtactcaaagcggacggggcgatcctcgtcgatttctgggcagagtggtgcggtccgaattccgtggttctgtgttcgcgttgtgggcgtttgtggcggtggtcgtgtgggactagtggtccgtgcaaaatgatcgccccgattctggatgaaatcgctgacgaatatcagggcaaactgaccgttgcaaaactgaacatcgatcaaaaccctggcactgcgccgaaatatggcatccgtggtatcccgactctgctgctgttcaaaaacggtgaagtggcggcaaccaaagtgggtgcactgtctaaaggtcagttgaaagagttcctcgacgctaacctggcgtaagcggccgc

SEQ ID NO: 1010 - DNA, 485 bp, Homo sapiens
aagcttgccaccatggagacagacacactcctgctatgggtactgctgctctgggttccaggttccactggtgacggatccatgagcgataaaattattcacctgactgacgacagttttgacacggatgtactcaaagcggacggggcgatcctcgtcgatttctgggcagagtggtgcggtccgaattccgggtggcggtggtgtggtcggtgtggggctttgtggtggcggcgtgttactagtggtccgtgcaaaatgatcgccccgattctggatgaaatcgctgacgaatatcagggcaaactgaccgttgcaaaactgaacatcgatcaaaaccctggcactgcgccgaaatatggcatccgtggtatcccgactctgctgctgttcaaaaacggtgaagtggcggcaaccaaagtgggtgcactgtctaaaggtcagttgaaagagttcctcgacgctaacctggcgtaagcggccgc

SEQ ID NO: 1011 - DNA, 485 bp, Homo sapiens
aagcttgccaccatggagacagacacactcctgctatgggtactgctgctctgggttccaggttccactggtgacggatccatgagcgataaaattattcacctgactgacgacagttttgacacggatgtactcaaagcggacggggcgatcctcgtcgatttctgggcagagtggtgcggtccgaattccgaggtgcggcaggttacgtgtattaggtgtcgtcggggttttctgttgactagtggtccgtgcaaaatgatcgccccgattctggatgaaatcgctgacgaatatcagggcaaactgaccgttgcaaaactgaacatcgatcaaaaccctggcactgcgccgaaatatggcatccgtggtatcccgactctgctgctgttcaaaaacggtgaagtggcggcaaccaaagtgggtgcactgtctaaaggtcagttgaaagagttcctcgacgctaacctggcgtaagcggccgc

SEQ ID NO: 1012 - DNA, 485 bp, Homo sapiens
aagcttgccaccatggagacagacacactcctgctatgggtactgctgctctgggttccaggttccactggtgacggatccatgagcgataaaattattcacctgactgacgacagttttgacacggatgtactcaaagcggacggggcgatcctcgtcgatttctgggcagagtggtgcggtccgaattccggtggtggggggatgatttgggaggcttggagttgttatgcgtgtgggactagtggtccgtgcaaaatgatcgccccgattctggatgaaatcgctgacgaatatcagggcaaactgaccgttgcaaaactgaacatcgatcaaaaccctggcactgcgccgaaatatggcatccgtggtatcccgactctgctgctgttcaaaaacggtgaagtggcggcaaccaaagtgggtgcactgtctaaaggtcagttgaaagagttcctcgacgctaacctggcgtaagcggccgc

SEQ ID NO: 1013 - DNA, 485 bp, Homo sapiens
aagcttgccaccatggagacagacacactcctgctatgggtactgctgctctgggttccaggttccactggtgacggatccatgagcgataaaattattcacctgactgacgacagttttgacacggatgtactcaaagcggacggggcgatcctcgtcgatttctgggcagagtggtgcggtccgaattccttgtggattgggccgggtgatcagggtctgtttcggcgttttgtttttactagtggtccgtgcaaaatgatcgccccgattctggatgaaatcgctgacgaatatcagggcaaactgaccgttgcaaaactgaacatcgatcaaaaccctggcactgcgccgaaatatggcatccgtggtatcccgactctgctgctgttcaaaaacggtgaagtggcggcaaccaaagtgggtgcactgtctaaaggtcagttgaaagagttcctcgacgctaacctggcgtaagcggccgc

SEQ ID NO: 1014 - DNA, 476 bp, Homo sapiens
aagcttgccaccatggagacagacacactcctgctatgggtactgctgctctgggttccaggttccactggtgacggatccgtgtcttctgatcaaaatcatttccgaggagaaattgaggaaaccatcactgaaagctttggtaatgatcatagcaccttggatgggtattccagaagaaccaccttgtcttcaaaaatgtatcacaccaaaggacaagaaggttctgtttgtctccggtcatcagactgtgcctcaggattgtgttgtgctagacacttctggtccaagatctgtaaacctgtcctgaaagaaggtcaagtgtgtaccaagcataggagaaaaggctctcatggactagaaatattccagcgttgttactgtggagaaggtctgtcttgccggatacagaaagatcaccatcaagccagtaattcttctaggcttcacacttgtcagagacactaagcggccgc

SEQ ID NO: 1015 - DNA, 539 bp, Homo sapiens
aagcttgccaccatggagacagacacactcctgctatgggtactgctgctctgggttccaggttccactggtgacggatcctgcgctagtcccacccgcggaggggacgcgggcgtgcaaatctgtctcgcctgcaggaagcgccgaaaacgctgcatgcgtcacgctatgtgctgccccgggaattactgcaaaaatggaatatgtgtgtcttctgatcaaaatcatttccgaggagaaattgaggaaaccatcactgaaagctttggtaatgatcatagcaccttggatgggtattccagaagaaccaccttgtcttcaaaaatgtatcacaccaaaggacaagaaggttctgtttgtctccggtcatcagactgtgcctcaggattgtgttgtgctagacacttctggtccaagatctgtaaacctgtcctgaaagaaggtcaagtgtgtaccaagcataggagaaaaggctctcatggactagaaatattccagcgttgttactgtggagaaggtctgtcttgctaagcggccgc

SEQ ID NO: 1016 - DNA, 416 bp, Homo sapiens
aagcttgccaccatgggcgataaaattattcacctgactgacgacagttttgacacggatgtactcaaagcggacggggcgatcctcgtcgatttctgggcagagtggtgcggtccgaattcctatgcgtggttgttttcttgtagtaggtgtaggtggtggttgccttggactagtggtccgtgcaaaatgatcgccccgattctggatgaaatcgctgacgaatatcagggcaaactgaccgttgcaaaactgaacatcgatcaaaaccctggcactgcgccgaaatatggcatccgtggtatcccgactctgctgctgttcaaaaacggtgaagtggcggcaaccaaagtgggtgcactgtctaaaggtcagttgaaagagttcctcgacgctaacctggcgtaagcggccgc

SEQ ID NO: 1017 - DNA, 416 bp, Homo sapiens
aagcttgccaccatgggcgataaaattattcacctgactgacgacagttttgacacggatgtactcaaacgccacggggcgatcctcgtcgatttctgggcagagtggtgcggtccgaattccatttgtgaggttgtgaggttgtggagtcggtatccttggtcttgggtgactagtggtccgtgcaaaatgatcgccccgattctggatgaaatcgctgacgaatatcagggcaaactgaccgttgcaaaactgaacatcgatcaaaaccctggcactgcgccgaaatatggcatccgtggtatcccgactctgctgctgttcaaaaacggtgaagtggcggcaaccaaagtgggtgcactgtctaaaggtcagttgaaagagttcctcgacgctaacctggcgtaagcggccgc

SEQ ID NO: 1018 - DNA, 422 bp, Homo sapiens
aagcttgccaccatgggcgataaaattattcacctgactgacgacagttttgacacggatgtactcaaagcggacggggcgatcctcgtcgatttctgggcagagtggtgcggtccgaattccggttgtactagtgcggtgtgtggtgcttgggctgaggcgggtaggttttattgtactagtggtccgtgcaaaatgatcgccccgattctggatgaaatcgctgacgaatatcagggcaaactgaccgttgcaaaactgaacatcgatcaaaaccctggcactgcgccgaaatatggcatccgtggtatcccgactctgctgctgttcaaaaacggtgaagtggcggcaaccaaagtgggtgcactgtctaaaggtcagttgaaagagttcctcgacgctaacctggcgtaagcggccgc

SEQ ID NO: 1019 - DNA, 416 bp, Homo sapiens
aagcttgccaccatgggcgataaaattattcacctgactgacgacagttttgacacggatgtactcaaagcggacggggcgatcctcgtcgatttctgggcagagtggtgcggtccgaattccttgtggattgggccgggtgatcagggtctgtttcggcgttttgtttttactagtggtccgtgcaaaatgatcgccccgattctggatgaaatcgctgacgaatatcagggcaaactgaccgttgcaaaactgaacatcgatcaaaaccctggcactgcgccgaaatatggcatccgtggtatcccgactctgctgctgttcaaaaacggtgaagtggcggcaaccaaagtgggtgcactgtctaaaggtcagttgaaagagttcctcgacgctaacctggcgtaagcggccgc

SEQ ID NO: 1020 - protein, 23 aa, Homo sapiens
METDTLLLWVLLLWVPGSTGDGS

SEQ ID NO: 1021 - protein, 154 aa, Homo sapiens
METDTLLLWVLLLWVPGSTGDGSMSDKIIHLTDDSFDTDVLKADGAILVDFWAEWCGPNSVVLCSRCGRLWRWSCGTSGPCKMIAPILDEIADEYQGKLTVAKLNIDQNPGTAPKYGIRGIPTLLLFKNGEVAATKVGALSKGQLKEFLDANLA

SEQ ID NO: 1022 - protein, 154 aa, Homo sapiens
METDTLLLWVLLLWVPGSTGDGSMSDKIIHLTDDSFDTDVLKADGAILVDFWAEWCGPNSGWRWCGRCGALWWRRVTSGPCKMIAPILDEIADEYQGKLTVAKLNIDQNPGTAPKYGIRGIPTLLLFKNGEVAATKVGALSKGQLKEFLDANLA

SEQ ID NO: 1023 - protein, 154 aa, Homo sapiens
METDTLLLWVLLLWVPGSTGDGSMSDKIIHLTDDSFDTDVLKADGAILVDFWAEWCGPNSEVRQVTCIRCRRGFLLTSGPCKMIAPILDEIADEYQGKLTVAKLNIDQNPGTAPKYGIRGIPTLLLFKNGEVAATKVGALSKGQLKEFLDANLA

SEQ ID NO: 1024 - protein, 154 aa, Homo sapiens
METDTLLLWVLLLWVPGSTGDGSMSDKIIHLTDDSFDTDVLKADGAILVDFWAEWCGPNSGGGGMIWEAWSCYACGTSGPCKMIAPILDEIADEYQGKLTVAKLNIDQNPGTAPKYGIRGIPTLLLFKNGEVAATKVGALSKGQLKEFLDANLA

SEQ ID NO: 1025 - protein, 154 aa, Homo sapiens
METDTLLLWVLLLWVPGSTGDGSMSDKIIHLTDDSFDTDVLKADGAILVDFWAEWCGPNSLWIGPGDQGLFRRFVFTSGPCKMIAPILDEIADEYQGKLTVAKLNIDQNPGTAPKYGIRGIPTLLLFKNGEVAATKVGALSKGQLKEFLDANLA

SEQ ID NO: 1026 - protein, 151 aa, Homo sapiens
METDTLLLWVLLLWVPGSTGDGSVSSDQNHFRGEIEETITESFGNDHSTLDGYSRRTTLSSKMYHTKGQEGSVCLRSSDCASGLCCARHFWSKICKPVLKEGQVCTKHRRKGSHGLEIFQRCYCGEGLSCRIQKDHHQASNSSRLHTCQRH

SEQ ID NO: 1027 - protein, 172 aa, Homo sapiens
METDTLLLWVLLLWVPGSTGDGSCASPTRGGDAGVQICLACRKRRKRCMRHAMCCPGNYCKNGICVSSDQNHFRGEIEETITESFGNDHSTLDGYSRRTTLSSKMYHTKGQEGSVCLRSSDCASGLCCARHFWSKICKPVLKEGQVCTKHRRKGSHGLEIFQRCYCGEGLSC

SEQ ID NO: 1028 - protein, 131 aa, Homo sapiens
MGDKIIHLTDDSFDTDVLKADGAILVDFWAEWCGPNSYAWLFSCSRCRWWLPWTSGPCKMIAPILDEIADEYQGKLTVAKLNIDQNPGTAPKYGIRGIPTLLLFKNGEVAATKVGALSKGQLKEFLDANLA

SEQ ID NO: 1029 - protein, 131 aa, Homo sapiens
MGDKIIHLTDDSFDTDVLKRHGAILVDFWAEWCGPNSICEVVRLWSRYPWSWVTSGPCKMIAPILDEIADEYQGKLTVAKLNIDQNPGTAPKYGIRGIPTLLLFKNGEVAATKVGALSKGQLKEFLDANLA

SEQ ID NO: 1030 - protein, 133 aa, Homo sapiens
MGDKIIHLTDDSFDTDVLKADGAILVDFWAEWCGPNSGCTSAVCGAWAEAGRFYCTSGPCKMIAPILDEIADEYQGKLTVAKLNIDQNPGTAPKYGIRGIPTLLLFKNGEVAATKVGALSKGQLKEFLDANLA

SEQ ID NO: 1031 - protein, 131 aa, Homo sapiens
MGDKIIHLTDDSFDTDVLKADGAILVDFWAEWCGPNSLWIGPGDQGLFRRFVFTSGPCKMIAPILDEIADEYQGKLTVAKLNIDQNPGTAPKYGIRGIPTLLLFKNGEVAATKVGALSKGQLKEFLDANLA

SEQ ID NO: 1032 - protein, 921 aa, Mus musculus
PASPLLLFANRRDVRLVDAGGVKLESTIVASGLEDAAAVDFQFSKGAVYWTDVSEEPEAFLVFTSRATIHRISLETNNNDVAIPLTGVKEASALDFDVSNNHIYWTDVSLKGAEEVLLLARRTDLRRISLDTPDFTDIVLQVGDIRHAIAIDYDPLEGYVYWTDDEVRPSTFLLFSQKFAISRMIPDDQLSPDLVLPLHGLRNVKAINYDPLDKFIYWVDGRQNAIKQTYLNQTGAAAQNIVISGLVSPDGLACDWVGKKLYWTDSETNRIEVANLNGTSTISRAFMNGSSVEHVIEFGLDYPEGMAVDWMGKNLYWADTGTNRIEVARLDGQFAIRRAYLDGSGAQTLVNTEINDPDGIAVDWVARNLYWTDTGTDRIEVTRLNGTSIKRAKDDGTQPSMLTSPSQSLSPDRQPHDLSIDIYSRTLFWTCEATNTINVHRLDGDARKVLFWQDLDQPRAIALDPAHGYMYWTDWGEAPRIERAGMDGSTRKIIVDSDIYWPNGLRQVLVWRDLDNPRSLALDPTKGYIYWTEWGGKPRIVRAFMDGTNCMTLVDKVGRANDLRKILVSEDLDEPRAIVLHPVMGLMYWTDWGENPKIECANLDGRDRHVLVNTSLGWPNGLMGVVLRGDRDKPRAIAVNAERGYMYFTNMQDHAAKIERASLDGTEREVLFTTGLIRPVALTIDLEEQKLYWADAKLSFIHRANLDGSFRQKVVEGSLTHPFALTLSGDTLYWTDWQTRSITIDYADQRLYWTDLDTNMIESSNMLGQERMVIADDLPYPFGLTQYSDYIYWTDWNLHSIALDLQEGKLYWGDAKTDKIEVINIDGTKRKTLLEDKLPHIFGFTLLGDFIYWTDWQRRSIVVDNALGKLFWVDADLKRIESCDLSGANRLTLEDANIVQPVGLTVLGRHLYWIDRQQQMI

SEQ ID NO: 1033 - protein, 231 aa, Mus musculus
PASPLLLFANRRDVRLVDAGGVKLESTIVASGLEDAAAVDFQFSKGAVYWTDVSEEAIKQTYLNQTGAAAQNIVISGLVSPDGLACDWVGKKLYWTDSETNRIEVANLNGTSRKVLFWQDLDQPRAIALDPAHGYMYWTDWGEAPRIERAGMDGSTRKIIVDSDIYWPNGLTIDLEEQKLYWADAKLSFIHHANLDGSFRQKVVEGSLTHPFALTLSGDTLYWTDWQTRSI

SEQ ID NO: 1034 - protein, 918 aa, Homo sapiens
PASPLLLFANRRDVRLVDAGGVKLESTIVVSGLEDAAAVDFQFSKGAVYWTDVSEEPEAFLVFTSRAAIHRISLETNNNDVAIPLTGVKEASALDFDVSNNHIYWTDVSLKEVLLLARRTDLRRISLDTPDFTDIVLQVDDIRHAIAIDYDPLEGYVYWTDDEVRPTTFLLFSQKSAISRMIPDDQHSPDLILPLHGLRNVKAIDYDPLDKFIYWVDGRQNAIKQTYLNQTGAAVQNVVISGLVSPDGLACDWVGKKLYWTDSETNRIEVANLNGTSTISRAFMNGSSVEHVVEFGLDYPEGMAVDWMGKNLYWADTGTNRIEVARLDGQFAIRRAYLDGSGAQTLVNTEINDPDGIAVDWVARNLYWTDTGTDRIEVTRLNGTSIKRAKDDGTQPFVLTSLSQGQNPDRQPHDLSIDIYSRTLFWTCEATNTINVHRLSGEARKVLFWQDLDQPRAIALDPAHGYMYWTDWGETPRIERAGMDGSTRKIIVDSDIYWPNGLRQVLVWRDLDNPRSLALDPTKGYIYWTEWGGKPRIVRAFMDGTNCMTLVDKVGRANDLRKILVSEDLDEPRAIALHPVMGLMYWTDWGENPKIECANLDGQERRVLVNASLGWPNGLMGVVLRGDRDKPRAIVVNAERGYLYFTNMQDRAAKIERAALDGTEREVLFTTGLIRPVALTIDLEEQKLYWADAKLSFIHRANLDGSFRQKVVEGSLTHPFALTLSGDTLYWTDWQTRSITIDYADQRLYWTDLDTNMIESSNMLGQERVVIADDLPHPFGLTQYSDYIYWTDWNLHSIALDLQEGKLYWGDAKTDKIEVINVDGTKRRTLLEDKLPHIFGFTLLGDFIYWTDWQRRSIVVDNTLGKLFWVDADLKRIESCDLSGANRLTLEDANIVQPLGLTILGKHIYWIDRQQQMI

SEQ ID NO: 1035 - protein, 921 aa, Homo sapiens [sequence omitted]

SEQ ID NO: 1036 - protein, 865 aa, Mus musculus
PAPLLLYANRRDLRLVDATNGKENATIVVGGLEDAAAVDFVFGHGLIYWSDVSEEPEAFLLFSRRADIRRISLETNNNNVAIPLTGVKEASALDFDVTDNRIYWTDISLKGATELLLLARRTDLRRISLDTPDFTDIVLQLEDIRHAIAIDYDPVEGYIYWTDDEVRAIKRTEFNKSESVQNVVVSGLLSPDGLACDWLGEKLYWTDSETNRIEVSNLDGSLTISRAFMNGSALEHVVEFGLDYPEGMAVDWLGKNLYWADTGTNRIEVSKLDGQHAIRRSFIDGSGSQFVVTAQIAHPDGIAVDWVARNLYWTDTGTDRIEVTRLNGTMSIRKAHEDGGQGFNVVANSVANQNLEIQPYDLSIDIYSRYIYWTCEATNVIDVTRLDGRSRKVLFWQELDQPRAIALDPSSGFMYWTDWGEVPKIERAGMDGSSRFVIINTEIYWPNGLRQVLVWKDLDSPRALALDPAEGFMYWTEWGGKPKIDRAAMDGSERTTLVPNVGRANGLRKILISEDLEEPRAIVLDPMVGYMYWTDWGEIPKIERAALDGSDRVVLVNTSLGWPNGLVGVVLKGEQDRPRAIVVNPEKGYMYFTNLQERSPKIERAALDGTEREVLFFSGLSKPIALTLDYQERKLYWADAKLNFIHKSNLDGTNRQAVVKGSLPHPFALTLFEDTLYWTDWNTHSITIDYAKRRLYWTDLDTNLIESSDMLGLNREVIADDLPHPFGLTQYQDYIYWTDWSRRSIALDYDEGTIYWGDAKTDKIEVMNTDGTGRRVLVEDKIPHIFGFTLLGDYVYWTDWQRRSIALDSKLGKLFWADSDLRRIESSDLSGANRIVLEDSNILQPVGLTVFENWLYWIDKQQQMI

SEQ ID NO: 1037 - protein, 231 aa, Pullus
PDEEPFLIFANRYYLRKLNLDGSNYTLLKQGLNNAVALDFDYREQMIYWTDVTTQGSMIRRMHINGSNVQVLHRTGLSNPDGLAVDWVGGNLYWCDKGRDTIEVSKLNGAYTRVLVNSGLREPRALVVDVQNGYLYWTDWGDHSLIGKIGMDGTNRSVIVDTKITWPNGLTLDYINSRIYWADAREDYIEFASLDGSNRHTVLSQDIPHIFALTLFEDYIYWTDEWETKSI

SEQ ID NO: 1038 - protein, 234 aa, Homo sapiens
PPPGTHLLFAQTGKIERLPLEGNTMRKTEAKAFLHVPAKVIIGLAFDCVDKMVYWTDITEPSIGRASLHGGEPTTIINQDLGSPEGIAVDHLGRNIFWTDSNLDRIEVAKLDGTQRRVLFETDLVNPRGIVTDSVRGNLYWTDWNRDNPKIETSYMDGTNRRILVQDDLGLPNGLHFDAFSSQLCWVDAGTNRAECLNPSQPSRRKALEGLQYPFAVTSYGKNLYFTDWKMNSV

SEQ ID NO: 1039 - protein, 231 aa, Homo sapiens
PCCCEEHHHHCCCCCEEECCCCCCCEEEEECCCCCEEEEEECCCCCEEEEECCCHHHHHHEEECCCCCCCEEEEEECCCCCCCEEEEECCCCEEEECCCCCEEEEEECCCCCCEEEEECCCCCCCCEEECCCCCEEEEECCCCCCHHHHHCCCCCCEEEEEECCCCCCCCCCCCCCCCCEEEECCCCCEEEEECCCCCCCCEEECCCCCCCCEEECCCCCEEECCCCCHHH

SEQ ID NO: 1040 - DNA, 11 bp, Homo sapiens
  fragment of SEQ ID NO.: 642
gatgatgatga

SEQ ID NO: 1041 - DNA, 11 bp, Homo sapiens
  fragment of SEQ ID NO.: 643
gatgatgatga

SEQ ID NO: 1042 - DNA, 11 bp, Homo sapiens
  fragment of SEQ ID NO.: 644
gatgatgatga

SEQ ID NO: 1043 - DNA, 11 bp, Homo sapiens
  fragment of SEQ ID NO.: 645
gatgatgatga

SEQ ID NO: 1044 - DNA, 11 bp, Homo sapiens
  fragment of SEQ ID NO.: 646
gatgatgatga

SEQ ID NO: 1045 - DNA, 11 bp, Homo sapiens
  fragment of SEQ ID NO.: 647
gatgatgatga

SEQ ID NO: 1046 - DNA, 11 bp, Homo sapiens
  fragment of SEQ ID NO.: 648
gatgatgatga

SEQ ID NO: 1047 - DNA, 11 bp, Homo sapiens
  fragment of SEQ ID NO.: 649
gatgatgatga

SEQ ID NO: 1048 - DNA, 11 bp, Homo sapiens
  fragment of SEQ ID NO.: 650
gatgatgatga

SEQ ID NO: 1049 - DNA, 11 bp, Homo sapiens
  fragment of SEQ ID NO.: 651
gatgatgatga

SEQ ID NO: 1050 - DNA, 11 bp, Homo sapiens
  fragment of SEQ ID NO.: 652
gatgatgatga

SEQ ID NO: 1051 - DNA, 11 bp, Homo sapiens
  fragment of SEQ ID NO.: 653
gatgatgatga

SEQ ID NO: 1052 - DNA, 11 bp, Homo sapiens
  fragment of SEQ ID NO.: 654
gatgatgatga

SEQ ID NO: 1053 - DNA, 11 bp, Homo sapiens
  fragment of SEQ ID NO.: 655
gatgatgatga

SEQ ID NO: 1054 - DNA, 11 bp, Homo sapiens
  fragment of SEQ ID NO.: 656
gatgatgatga

SEQ ID NO: 1055 - DNA, 11 bp, Homo sapiens
  fragment of SEQ ID NO.: 657
gatgatgatga

SEQ ID NO: 1056 - DNA, 11 bp, Homo sapiens
  fragment of SEQ ID NO.: 658
gatgatgatga

SEQ ID NO: 1057 - DNA, 11 bp, Homo sapiens
  fragment of SEQ ID NO.: 659
gatgatgatga

SEQ ID NO: 1058 - DNA, 11 bp, Homo sapiens
  fragment of SEQ ID NO.: 660
gatgatgatga

SEQ ID NO: 1059 - DNA, 11 bp, Homo sapiens
  fragment of SEQ ID NO.: 661
gatgatgatga

SEQ ID NO: 1060 - DNA, 11 bp, Homo sapiens
  fragment of SEQ ID NO.: 662
gatgatgatga

SEQ ID NO: 1061 - DNA, 11 bp, Homo sapiens
  fragment of SEQ ID NO.: 663
gatgatgatga

SEQ ID NO: 1062 - DNA, 11 bp, Homo sapiens
  fragment of SEQ ID NO.: 664
gatgatgatga

SEQ ID NO: 1063 - DNA, 11 bp, Homo sapiens
  fragment of SEQ ID NO.: 665
gatgatgatga

SEQ ID NO: 1064 - DNA, 11 bp, Homo sapiens
gatgatgatga

SEQ ID NO: 1065 - DNA, 11 bp, Homo sapiens
gatgatgatga

SEQ ID NO: 1066 - DNA, 11 bp, Homo sapiens
gatgatgatga

SEQ ID NO: 1067 - DNA, 11 bp, Homo sapiens
gatgatgatga

SEQ ID NO: 1068 - DNA, 11 bp, Homo sapiens
gatgatgatga

SEQ ID NO: 1069 - DNA, 11 bp, Homo sapiens
gatgatgatga

SEQ ID NO: 1070 - DNA, 11 bp, Homo sapiens
gatgatgatga

SEQ ID NO: 1071 - DNA, 11 bp, Homo sapiens
gatgatgatga

SEQ ID NO: 1072 - DNA, 11 bp, Homo sapiens
gatgatgatga

SEQ ID NO: 1073 - DNA, 11 bp, Homo sapiens
gatgatgatga

SEQ ID NO: 1074 - DNA, 11 bp, Homo sapiens
gatgatgatga

SEQ ID NO: 1075 - DNA, 11 bp, Homo sapiens
gatgatgatga

SEQ ID NO: 1076 - DNA, 11 bp, Homo sapiens
gatgatgatga

SEQ ID NO: 1077 - DNA, 11 bp, Homo sapiens
gatgatgatga

SEQ ID NO: 1078 - DNA, 11 bp, Homo sapiens
gatgatgatga

SEQ ID NO: 1079 - DNA, 11 bp, Homo sapiens
gatgatgatga

SEQ ID NO: 1080 - DNA, 11 bp, Homo sapiens
gatgatgatga

SEQ ID NO: 1081 - DNA, 11 bp, Homo sapiens
gatgatgatga

SEQ ID NO: 1082 - DNA, 11 bp, Homo sapiens
gatgatgatga

SEQ ID NO: 1083 - DNA, 11 bp, Homo sapiens
gatgatgatga

SEQ ID NO: 1084 - DNA, 11 bp, Homo sapiens
gatgatgatga

SEQ ID NO: 1085 - DNA, 11 bp, Homo sapiens
gatgatgatga

SEQ ID NO: 1086 - DNA, 11 bp, Homo sapiens
gatgatgatga

1. A nucleic acid comprising a mutation in LRP5 or LRP6 which results in a HBM-like phenotype when expressed in a cell, wherein said HBM-like phenotype results in bone mass modulation and/or lipid level modulation.

2. A LRP5 nucleic acid comprising at least one mutation of Tables 2 or 3 or which results in a mutation of one of the following G171V, A214V, A65V, M282V, G171K, G171F, G171I, G171Q, L200V, T201V, I202V, or S127V when expressed in a cell, and wherein expression of the nucleic acid in a subject results in bone mass modulation and/or lipid level modulation.

3. A LRP6 nucleic acid comprising at least one of Tables 2 or 3 or which results in a mutation of one of the following G171V, A214V, A65V, M282V, G171K, G171F, G171I, G171Q, L200V, T201V, I202V, or S127V when expressed in a cell, and wherein said mutation occurs in LRP6 in a position equivalent to LRP5 such that expression of the nucleic acid in a subject results in bone mass modulation and/or lipid level modulation.

4. A LRP5 nucleic acid encoding at least one amino acid mutation in propeller 1.

5. The LRP5 nucleic acid of claim 4, wherein said nucleic acid encodes for at least one mutation selected from the group consisting of: G171V, A214V, A65V, M282V, G171K, G171F, G171I, G171Q, L200V, T201V, I202V, and S127V.

6. A LRP6 nucleic acid encoding at least one amino acid mutation in propeller 1.

7. The LRP6 nucleic acid of claim 6, wherein said nucleic acid encodes for at least one mutation in an equivalent position of LRP6 selected from the group of LRP5 mutations consisting of: G171V, A214V, A65V, M282V, G171K, G171F, G171I, G171Q, L200V, T201V, I202V, and S127V.

8. The nucleic acid of claim 1, wherein the mutation is G171V, A214V, A65V, M282V, G171K, G171F, G171I or G171Q in LRP5 or in an equivalent domain in LRP6.

9. A polypeptide encoded by a nucleic acid of claim 1, wherein said polypeptide when expressed in a cell modulates Wnt signaling, Dkk activity, LRP5 activity and/or LRP6 activity.

10. The polypeptide of claim 9, wherein said polypeptide modulates bone mass and/or lipid levels when expressed in a subject.

11. A vector comprising a nucleic acid of claim 1.

12. A cell comprising the vector of claim 11.

13. The cell of claim 12, wherein said cell is a cancer cell, a liver cell or a bone cell.

14. A polypeptide or biologically active fragment thereof derived from LRP5 comprising at least one amino acid change of Table 2, G171V, A214V, A65V, M282V, G171K, G171F, G171I, G171Q, L200V, T201V, I202V, or S127V.

15. The polypeptide or biologically active fragment of claim 14, wherein said protein or biologically active fragment comprises at least one amino acid change of G171V, A214V, A65V, M282V, G171K, G171F, G171I, G171Q, L200V, T201V, I202V, or S127V..

16. A polypeptide or biologically active fragment thereof derived from LRP6 comprising at least one amino acid change of Table 2, G171V, A214V, A65V, M282V, G171K, G171F, G171I, G171Q, L200V, T201V, I202V, or S127V when the amino acid change is expressed in an equivalent position in LRP6.

17. The polypeptide or biologically active fragment of claim 16, wherein said protein or biologically active fragment comprises at least one amino acid change of G171V, A214V, A65V, M282V, G171K, G171F, G171I, G171Q, L200V, T201V, I202V, or S127V.

18. A polypeptide or biologically active fragment which when expressed in a subject has a HBM-like phenotype comprising at least one amino acid mutation in propeller 1 with the proviso that if the mutation is G171V that a second mutation which maintains the HBM-like phenotype is also present.

19. The polypeptide or biologically active fragment of claim 18, wherein said polypeptide is derived from LRP5, LRP6 or HBM.

20. The polypeptide or biologically active fragment of claim 14, wherein the amino acid change is G171V, A214V, A65V, M282V, G171K, G171F, G171I or G171Q of LRP5 or an equivalent position in LRP6.

21. An antibody or immunogenic fragment thereof which binds to a polypeptide or antigenic fragment thereof of claim 14.

22. The antibody or immunogenic fragment thereof of claim 21, wherein the antibody is a monoclonal antibody, a chimeric antibody, a bispecific antibody, a humanized antibody, a primatized® antibody, a human antibody, or a labeled antibody.

23. An antibody which binds to a polypeptide comprising ²⁰⁸KLYWADAKLSFIHRAN²²³, ²⁷⁷ALYSPMDIQVLSQER²⁹¹, ⁶¹GLEDAAAVDFQFSKGA⁷³, ²³⁴EGSLTHPFALTLSG²⁴⁷, ²⁴⁹TLYWTDWQTRSIHACN²⁶⁴, ¹⁴⁴VLFWQDLDQPRAI¹⁵⁶, ¹⁹⁴IYWPNGLTIDLEEQKLY²¹⁰, ³⁴LLLFANRRDVRLVD⁴⁷, ⁷⁵GAVYWTDVSEEAIKQ⁸⁹, ¹²¹KLYWTDSETNRIEVA¹³⁵ of LRP5 or an equivalent domain on LRP6 or variants thereof.

24. An antibody which binds to a polypeptide comprising ⁹⁶⁹LILPLHGLRNVKAIDYDPLDKFIYW⁹⁹³, ⁹⁸⁹KFIYWVDGRQNIKRAKDDGTQPFVL¹⁰¹³, ¹⁰⁰⁹QPFVLTSLSQGQNPDRQPHDLSIDI¹⁰³³, ¹⁰²⁹LSIDIYSRTLFWTCEATNTINVHRL¹⁰⁵³, ¹⁰⁴⁹NVHRLSGEAMGVVLRGDRDKPRAIV¹⁰⁷³, ¹²⁵³CGEPPTCSPDQFAC¹²⁶⁶, ¹²⁷⁸WRCDGFPECDDQSDEEGC¹²⁹⁵, ¹³¹⁶RCDGEADCQDRSDEADC¹³³², ¹³⁷⁰CEITKPPSDDSPAH¹³⁸³ of LRP5 or an equivalent domain on LRP6 or variants thereof, wherein said antibody modulates binding of LRP5, HBM, LRP6 or variants thereof to Dkk.

25. A method of diagnosing a HBM-like phenotype in a subject comprising
(A) obtaining a biological sample from the subject;
(B) exposing the sample to an antibody or an immunogenic fragment of claim 22; and
(C) detecting whether the antibody bound a protein from the biological sample from the subject to determine whether the subject has a HBM-like phenotype.

26. A composition for modulating bone mass and/or lipid levels in a subject comprising a therapeutically effective amount of an antibody of claim 21 and a pharmaceutically acceptable carrier.

27. An antibody or an immunogenic fragment thereof of claim 21, wherein the antibody or immunogenic fragment thereof can (1) discriminate between LRP5 and an HBM-like protein, (2) discriminate between LRP6 and an HBM-like protein, or (3) discriminate between HBM and an HBM-like protein.

28. A transgenic animal having somatic and/or germ cells comprising a nucleic acid which comprises a promoter region that directs protein expression in animal and/or human cells operably linked to a nucleic acid of claim 2, and wherein said transgenic animal has at least three bone parameters modulated by the expression of said nucleic acid.

29. The transgenic animal of claim 28, wherein the promoter region is selected from the group consisting of CMV, RSV, SV40, and EF-1a, CMVβbActin, histone, type I collagen, TGFβ1, SX2, cfos/cjun, Cbfal, Fra/Jun, Dlx5, osteocalcin, osteopontin, bone sialoprotein, and collagenase promoter regions.

30. A transgenic animal having somatic and/or germ cells comprising a nucleic acid which comprises a sequence which encodes a polypeptide of claim 9, and wherein the nucleic acid further comprises an operably linked promoter region that directs protein expression in animal and/or human cells, and wherein the transgenic animal has at least three bone parameters modulated by the expression of said nucleic acid.

31. An animal embryo comprising a nucleic acid comprising a promoter region that directs protein expression in animal and/or human cells operably linked to a nucleic acid of claim 2.

32. An animal or human cell transfected with a nucleic acid which comprises a promoter region that directs protein expression in animal and/or human cells operably linked to a nucleic acid of claim 2.

33. The transgenic animal of claim 28, wherein a human HBM-like protein is expressed and passes the human HBM-like gene to its offspring.

34. A transgenic animal produced from the transgenic animal of claim 33 or its offspring.

35. An animal model for the study of bone density modulation and/or lipid level modulation comprising a first group of animals composed of the transgenic animal of claim 28 and a second group of control animals.

36. The animal model of claim 35, wherein the group of transgenic animals have cells which comprise a nucleic acid encoding human an HBM-like protein or biologically active polypeptide fragment thereof.

37. An animal model for the study of bone density modulation comprising a first group of animals composed of the transgenic animals of claim 30 and a second group of control animals.

38. A method of identifying agents which modulate the activity of an HBM-like nucleic acid comprising:
(a) transfecting a cell with a vector of claim 11;
(b) exposing the transfected cell of step (a) to a compound; and
(c) determining whether the compound modulates the activity of the HBM-like nucleic acid.

39. A method of identifying agents which modulate the activity of an HBM-like protein comprising:
(a) transfecting a cell with a vector of claim 11;
(b) exposing the transfected cell of step (a) to a compound; and
(c) determining whether the compound modulates the activity of the HBM-like protein.

40. The method of claim 39, wherein the compound is a hormone, a growth factor, a peptide, RNA, shRNA, siRNA, DNA, a mineral, a vitamin, a natural product, or a synthetic organic compound.

41. A method for identifying compounds which modulate the interaction of Dkk with the Wnt signaling pathway comprising:
(a) transfecting cells with constructs containing a nucleic acid of claim 2;
(b) assessing changes in expression of a reporter element linked to a Wnt-responsive promoter; and
(c) identifying as a Dkk/Wnt interaction modulating compound any compound which alters reporter gene expression compared with cells transfected with a Dkk construct alone.

42. The method according to claim 41, wherein the cells are cancer cells, liver cells or bone cells.

43. The method according to claim 42, wherein the cells are U2-OS, HOB-03-CE6, or HEK293 cells.

44. The method according to claim 41, wherein the reporter element used is TCF-luciferase, tk-Renilla, or a combination thereof.

45. A method of diagnosing a subject as expressing a nucleic acid comprising a nucleotide change of Tables 2 or 3, the method comprising the steps of:
(A) obtaining a biological sample from the subject; and
(B) assaying for the presence of the nucleotide change which results in HBM phenotype.

46. A method for identifying agents which modulate LRP5, LRP6, or HBM comprising the steps of:
(A) providing cells according to claim 32;
(B) exposing the cells to a test compound; and
(C) measuring the expression of LRP5, LRP6 or HBM respectively.

47. The method for identifying agents of claim 42, further comprising a step of determining whether the agent further modulates bone mass and/or lipid levels.

48. An agent identified by the method of claim 46.
